(19) United States
(12) Patent Application Publication
(10) Pub. No.: US 2023/0227802 A1
(43) Pub. Date: Jul. 20, 2023

(54) COMPOSITIONS AND METHODS FOR THE TREATMENT OF NEUROLOGICAL DISORDERS RELATED TO GLUCOSYLCERAMIDASE BETA DEFICIENCY

(71) Applicant: VOYAGER THERAPEUTICS, INC., Cambridge, MA (US)

(72) Inventors: Giridhar MURLIDHARAN, Malden, MA (US); Jeffrey BROWN, Medway, MA (US); Elisabeth KNOLL, Melrose, MA (US); Yanqun SHU, Winchester, MA (US); Kelly BALES, Lincoln, MA (US); Jinzhao HOU, Lexington, MA (US); Adewale ADELUYI, Boston, MA (US); Brett HOFFMAN, Braintree, MA (US); Smita JAGTAP, Melrose, MA (US)

(21) Appl. No.: 18/018,017

(22) PCT Filed: Jul. 26, 2021
(86) PCT No.: PCT/US2021/043216

§ 371 Date: Jan. 25, 2023

Related U.S. Application Data
(60) Provisional application No. 63/057,265, filed on Jul. 27, 2020.

(51) Int. Cl. C12N 9/24; C12N 15/86; A61P 25/28

(52) U.S. Cl. CPC C12N 9/2402; C12N 15/86; A61P 25/28; C12N 2750/14143; C12Y 302/01045

(57) ABSTRACT

The disclosure relates to compositions and methods for altering, e.g., enhancing, the expression of GCase proteins, whether in vitro and/or in vivo. Such compositions include delivery of an adeno-associated viral (AAV) particle. The compositions and methods of the present disclosure are useful in the treatment of subjects diagnosed with, or suspected of having Parkinson Disease or related condition resulting from a deficiency in the quantity and/or function of GBA gene product or associated with decreased expression or protein levels of GCase protein.

### RELATED APPLICATIONS

[0001] This application claims priority to U.S. provisional application No. 63/057,265, filed on Jul. 27, 2020. The entire contents of the foregoing application are hereby incorporated herein by reference.

### SEQUENCE LISTING

[0002] The present application is being filed along with a Sequence Listing in electronic format. The Sequence Listing file, entitled 135333-00120_SL.txt, was created on Jul. 23, 2021, and is 6,773,307 bytes in size. The information in electronic format of the Sequence Listing is incorporated herein by reference in its entirety.

### FIELD OF THE DISCLOSURE

[0003] Described herein are compositions and methods relating to polynucleotides, e.g. polynucleotides encoding glucosylceramidase beta (GBA) proteins and peptides for use in the treatment of Parkinson Disease (PD) and related disorders, including Gaucher Disease, and Dementia with Lewy Bodies (collectively, “GBA-related disorders”). In some embodiments, compositions may be delivered in an adeno-associated viral (AAV) vector. In other embodiments, compositions described herein, may be used to treat a subject in need thereof, such as a human subject diagnosed with GBA-related disorders or other condition resulting from a deficiency in the quantity and/or function of GBA protein, or as a research tool in the study of diseases or conditions in cells or animal models of such disease or condition.

### BACKGROUND

[0004] Lysosomal acid glucosylceramidase, commonly called glucosylcerebrosidase or GCase, a D-glucosyl-N-acylsphingosine glucohydrolase, is a lysosomal membrane protein important in glycolipid metabolism. The enzyme is encoded by glucosylceramidase beta (GBA) gene (Ensembl Gene ID No. ENSG00000177628). This enzyme, together with Saposin A and Saposin C, catalyzes the hydrolysis of glucosylceramide to ceramide and glucose. See Vaccaro, Anna Maria, et al. Journal of Biological Chemistry 272.27 (1997): 16862-16867, the contents of which are incorporated herein by reference in their entirety.

[0005] Mutations in GBA are known to cause disease in human subjects. Homozygous or compound heterozygous GBA mutations lead to Gaucher disease (“GD”). See Sardi, S. Pablo, Jesse M. Cedarbaum, and Patrik Brundin. Movement Disorders 33.5 (2018): 684-696, the contents of which are herein incorporated by reference in their entirety. Gaucher disease is one of the most prevalent lysosomal storage disorders, with an estimated standardized birth incidence in the general population of between 0.4 to 5.8 individuals per 100,000. Heterozygous GBA mutations can lead to PD. Indeed, GBA mutations occur in 7-10% of total PD patients, making GBA mutations the most important genetic risk factor of PD. PD-GBA patients have reduced levels of lysosomal enzyme beta-glucocerebrosidase (GCase), which results in increased accumulations of glycosphingolipid glucosylceramide (GluCer), which in turn is correlated with exacerbated α-Synuclein aggregation and concomitant neurological symptoms. Gaucher disease and PD, as well as other lysosomal storage disorders including Lewy body diseases such as Dementia with Lewy Bodies, and related diseases, in some cases, share common etiology in the GBA gene. See Sidransky, E. and Lopez, G. Lancet Neurol. 2012 November; 11(11): 986-998, the contents of which are incorporated by reference in their entirety. Limited treatment options exist for such diseases.

[0006] Consequently, there remains a long felt-need to develop pharmaceutical compositions and methods for the treatment of PD and other GBA-related disorders and to ameliorate deficiencies of GCase protein in patients afflicted with GBA-related disorders.

### SUMMARY

[0007] The present disclosure addresses these challenges by providing AAV-based compositions and methods for treating GCase deficiency in patients. Disclosed herein are compositions and methods directed to AAV-based gene delivery of GCase to ameliorate loss-of-function and to improve intracellular lipid trafficking. The compositions and methods are useful to improve lysosomal glycolipid metabolism, and to slow, halt, or reverse neurodegenerative and other symptoms of PD and GBA-related disorders (e.g., dementia with Lewy Bodies (DLB), Gaucher disease (GD)) in a subject (e.g., a subject having a mutation in a GBA gene). A β-glucocerebrosidase (GBA) protein is also sometimes referred to as a GCase protein herein.

[0008] Accordingly, in one aspect, the present disclosure provides an isolated, e.g., recombinant, nucleic acid comprising a transgene encoding a GBA protein, wherein the nucleotide sequence encoding the GBA protein comprises a nucleotide sequence, e.g., a codon optimized nucleotide sequence, at least 88% (e.g., at least 89, 90, 92, 95, 96, 97, 98, or 99%) identical to the nucleotide sequence of SEQ ID NO: 1773. In some embodiments, the nucleic acid further encodes an enhancement element, e.g., an enhancement element described herein.

[0009] In another aspect, the disclosure provides an isolated, e.g., recombinant, nucleic acid comprising a transgene encoding a GBA protein and an enhancement element, wherein the encoded enhancement element comprises: a Saposin C polypeptide or functional fragment or variant thereof, optionally comprising the amino acid sequence of SEQ ID NO: 1789 or 1758, or an amino acid sequence at least 85% (e.g., at least 90%, 92%, 95%, 97%, 98%, or 99%) identical thereto; a cell penetrating peptide, optionally comprising the amino acid sequence of any of SEQ ID NOs: 1794, 1796, or 1798, or an amino acid sequence having at least one, two, or three but no more than four modifications, e.g., substitutions (e.g., conservative substitutions), relative to SEQ ID NOs: 1794, 1796, or 1798; and/or a lysosomal targeting sequence, optionally comprising the amino acid sequence of any of SEQ ID NOs: 1800, 1802, 1804, 1806, or 1808, or an amino acid sequence having at least one, two, or three but no more than four modifications, e.g., substitutions (e.g., conservative substitutions), relative to SEQ ID NOs: 1800, 1802, 1804, 1806, or 1808.

[0010] In another aspect, the present disclosure provides, an isolated, e.g., recombinant viral genome comprising a nucleic acid comprising a transgene encoding a GBA protein, and further comprising a nucleotide sequence encoding a miR binding site that modulates, e.g., reduces, expression of the encoded GBA protein in a cell or tissue of the DRG, liver, hematopoietic lineage, or a combination thereof. In some embodiments, the encoded miR binding site comprises a miR183 binding site. In some embodiments, the viral genome further encodes an enhancement element, e.g., an enhancement element described herein.

[0011] In yet another aspect, the present disclosure provides an isolated, e.g., recombinant viral genome comprising a promoter operably linked to a nucleic acid comprising a transgene encoding a GBA protein described herein. In some embodiments, the viral genome comprises an internal terminal repeat (ITR) sequence (e.g., an ITR region described herein), an enhancer (e.g., an enhancer described herein), an intron region (e.g., an intron region described herein), a Kozak sequence (e.g., a Kozak sequence described herein), an exon region (e.g., an exon region described herein), a nucleotide sequence encoding a miR binding site (e.g., a miR binding site described herein) and/or a poly A signal region (e.g., a poly A signal sequence described herein). In some embodiments, the viral genome comprises the nucleotide sequence of SEQ ID NO: 1812 or 1826, or a nucleotide sequence at least 95% identical thereto. In some embodiments, the viral genome comprises the nucleotide sequence of any one of SEQ ID NOs: 1759-1771, 1809-1811, or 1813-1827, or a nucleotide sequence at least 95% identical thereto.

[0012] In yet another aspect, the present disclosure provides an isolated, e.g., recombinant, AAV particle comprising a capsid protein and a viral genome comprising a promoter (e.g., a promoter described herein) operably linked transgene encoding a GBA protein described herein. In some embodiments, the capsid protein comprises an AAV capsid protein. In some embodiments, the capsid protein comprises a VOY101 capsid protein, an AAV9 capsid protein, or a functional variant thereof.

[0013] In yet another aspect, the present disclosure provides a method of making a viral genome described herein The method comprising providing a nucleic acid encoding a viral genome described herein and a backbone region suitable for replication of the viral genome in a cell, e.g., a bacterial cell (e.g., wherein the backbone region comprises one or both of a bacterial origin of replication and a selectable marker), and excising the viral from the backbone region, e.g., by cleaving the nucleic acid molecule at upstream and downstream of the viral genome.

[0014] In yet another aspect, the present disclosure provides a method of making an isolated, e.g., recombinant AAV particle. The method comprising providing a host cell comprising a viral genome described herein and incubating the host cell under conditions suitable to enclose the viral genome in the AAV particle, e.g., a VOY101 capsid protein, thereby making the isolated AAV particle.

[0015] In yet another aspect, the present disclosure provides method of delivering an exogenous GBA protein, to a subject. The method comprises administering an effective amount of an AAV particle or a plurality of AAV particles, described herein, said AAV particle comprising a viral genome described herein, e.g., a viral genome comprising a nucleic acid comprising a transgene encoding a GBA protein described herein.

[0016] In yet another aspect, the present disclosure provides method of treating a subject having or diagnosed with having a disease associated with GBA expression, a neurological disorder, or a neuromuscular disorder. The method comprises administering an effective amount of an AAV particle or a plurality of AAV particles, described herein, said AAV particle comprising a viral genome described herein, e.g., a viral genome comprising a nucleic acid comprising a transgene encoding a GBA protein described herein. In some embodiments, the disease associated with expression of GBA or the neurodegenerative or neuromuscular disorder comprises Parkinson's Disease (PD) (e.g., a PD associated with a mutation in a GBA gene), dementia with Lewy Bodies (DLB), Gaucher disease (GD), Spinal muscular atrophy (SMA), Multiple System Atrophy (MSA), or Multiple sclerosis (MS).

[0017] In some aspects, the present disclosure provides AAV viral genomes comprising at least one inverted terminal repeat (ITR) and a payload region, wherein the payload region encodes one or more GCase proteins including GCase peptides. In some embodiments, the AAV viral genome comprises a 5′ ITR, a promoter, a payload region comprising a nucleotide sequence encoding a GCase protein, and a 3′ ITR. The encoded protein may be a human (Homo sapiens) GCase, a cynomolgus monkey (Macaca fascicularis) GCase, or a rhesus monkey (Macaca mulatta) GCase, a synthetic (non-naturally occurring) GCase, or a derivative thereof, e.g., a variant that retains one or more function of a wild-type GCase protein. In some embodiments, the GCase may be at least partially humanized.

[0018] The GCase of the present disclosure can be co-expressed with a saposin protein. In some embodiments, the transgene encoding the GCase includes a nucleotide sequence encoding the saposin protein. In some embodiments, the saposin protein is saposin A (SapA). In some embodiments, the saposin protein in saposin C (SapC).

[0019] Viral genomes may be incorporated into an AAV particle, wherein the AAV particle comprises a viral genome and a capsid. In some embodiments, the capsid comprises a sequence as shown in Table 1.

[0020] In some embodiments, the AAV particles described herein may be used in pharmaceutical compositions. The pharmaceutical compositions may be used to treat a disorder or condition associated with decreased GCase expression, activity, or protein levels. In some embodiments, the disorder or condition is a lysosomal lipid storage disorder. In some embodiments, the disorder or condition associated with decreased GCase protein levels is PD (e.g., a PD associated with a mutation in a GBA gene), Gaucher disease (e.g., Type 1 GD (e.g., non-neuronopathic GD), Type 2 (e.g., acute neuronopathic GD), or Type 3 GD), or other GBA-related disorder (e.g., dementia with Lewy Bodies (DLB). In some embodiments, administration of AAV particles may result in enhanced GCase expression in a target cell.

[0021] In some aspects, the present disclosure provides methods of increasing GCase enzyme activity in patients using AAV mediated gene transfer of an optimized GBA transgene cassette. The AAV mediated gene transfer can be optimized to achieve widespread CNS distribution, and thereby decrease substrate glycosphingolipid glucosylceramide/GluCer levels and α-synuclein pathology, slowing or reversing disease pathogenesis in patients with GB A-related disorders, including GBA patients with Parkinson disease (GBA-PD), Gaucher disease (e.g., Type 2 or 3 GD), and Dementia with Lewy body disease. In some embodiments, the methods involve intrastriatal (ISTR) or intracisternal (ICM) administration of AAV vectors packaging optimized GBA gene replacement transgene cassettes as described herein to achieve widespread, cell-autonomous transduction and cross-correction of therapeutic GCase enzyme.

[0022] Those skilled in the art will recognize or be able to ascertain using no more than routine experimentation, many equivalents to the specific embodiments of the invention described herein. Such equivalents are intended to be encompassed by the following enumerated embodiments.

### Enumerated Embodiments

[0023] 1. An isolated, e.g., recombinant, nucleic acid comprising a transgene encoding a β-glucocerebrosidase (GBA) protein, wherein the nucleotide sequence encoding the GBA protein comprises a nucleotide sequence, e.g., a codon optimized nucleotide sequence, at least 88% (e.g., at least 89, 90, 92, 95, 96, 97, 98, or 99%) identical to the nucleotide sequence of SEQ ID NO: 1773.

[0024] 2. The isolated nucleic acid of embodiment 1, wherein the nucleotide sequence encoding the GBA protein comprises a nucleotide sequence at least 90% identical to SEQ ID NO: 1773.

[0025] 3. The isolated nucleic acid of embodiment 1 or 2, wherein the nucleotide sequence encoding the GBA protein comprises a nucleotide sequence at least 95% identical to SEQ ID NO: 1773.

[0026] 4. The isolated nucleic acid of any one of embodiments 1-3, wherein the nucleotide sequence encoding the GBA protein comprises the nucleotide sequence of SEQ ID NO: 1773.

[0027] 5. The isolated nucleic acid of any one of embodiments 1-4, further comprising an enhancement element.

[0028] 6. An isolated, e.g., recombinant, nucleic acid comprising a transgene encoding a β-glucocerebrosidase (GBA) protein and an enhancement element, wherein the encoded enhancement element comprises:

[0029] (a) a Saposin C polypeptide or functional fragment or variant thereof, optionally comprising the amino acid sequence of SEQ ID NO: 1789 or 1758, or an amino acid sequence at least 85% (e.g., at least 90%, 92%, 95%, 97%, 98%, or 99%) identical thereto;

[0030] (b) a cell penetrating peptide, optionally comprising the amino acid sequence of any of SEQ ID NOs: 1794, 1796, or 1798, or an amino acid sequence having at least one, two, or three but no more than four modifications, e.g., substitutions (e.g., conservative substitutions), relative to SEQ ID NOs: 1794, 1796, or 1798; and/or

[0031] (c) a lysosomal targeting sequence, optionally comprising the amino acid sequence of any of SEQ ID NOs: 1800, 1802, 1804, 1806, or 1808, or an amino acid sequence having at least one, two, or three but no more than four modifications, e.g., substitutions (e.g., conservative substitutions), relative to SEQ ID NOs: 1800, 1802, 1804, 1806, or 1808.

[0032] 7. An isolated, e.g., recombinant viral genome comprising a nucleic acid comprising a transgene encoding a β-glucocerebrosidase (GBA) protein, and further comprising a nucleotide sequence encoding a miR binding site that modulates, e.g., reduces, expression of the encoded GBA protein in a cell or tissue of the DRG, liver, hematopoietic lineage, or a combination thereof.

[0033] 8. The viral genome of embodiment 7, wherein the nucleic acid further encodes an enhancement element.

[0034] 9. The isolated nucleic acid of embodiment 5 or 6, or the viral genome of embodiment 8, wherein the encoded enhancement element comprises a Saposin C polypeptide or functional fragment or variant thereof.

[0035] 10. The isolated nucleic acid of embodiment 5-6 or 9, or the viral genome of embodiment 8 or 9, wherein:

[0036] (i) the encoded Saposin C polypeptide or functional fragment or variant thereof comprises the amino acid sequence of SEQ ID NO: 1789 or 1758, or an amino acid sequence at least sequence at least 85% (e.g., at least 90%, 92%, 95%, 97%, 98%, or 99%) identical thereto; and/or

[0037] (ii) the nucleotide sequence encoding the encoded Saposin C polypeptide or functional fragment or variant thereof comprises the nucleotide sequence of SEQ ID NO: 1787 or 1791, or a nucleotide sequence at least 85% (e.g., at least 90%, 92%, 95%, 97%, 98%, or 99%) identical thereto.

[0038] 11. The isolated nucleic acid of embodiment 5, or the viral genome of embodiment 8, wherein:

[0039] (i) the encoded enhancement element comprises the amino acid sequence of any of SEQ ID NOs: 1750, 1752, 1754, 1756-1758, 1784, or 1785, an amino acid sequence having at least one, two, or three but no more than four modifications, e.g., substitutions (e.g., conservative substitutions), relative to SEQ ID NO: 1750, 1752, 1754, 1756-1758, 1784, or 1785, or an amino acid sequence at least 85% (e.g., at least 90%, 92%, 95%, 97%, 98%, or 99%) identical thereto; and/or

[0040] (ii) the nucleotide sequence encoding the enhancement element comprises the nucleotide sequence of any one of SEQ ID NOs: 1751, 1753, 1755, 1858, or 1859, or a nucleotide sequence at least 85% (e.g., at least 90%, 92%, 95%, 97%, 98%, or 99%) identical thereto.

[0041] 12. The isolated nucleic acid of any one of embodiments 5-6 or 9-11, or the viral genome of embodiment 8-11, wherein the encoded enhancement element comprises a cell penetrating peptide.

[0042] 13. The isolated nucleic acid of embodiment 6 or 12, or the viral genome of embodiment 12, wherein:

[0043] (i) the cell penetrating peptide comprises the amino acid sequence of any of SEQ ID NOs: 1794, 1796, or 1798, or an amino acid sequence having at least one, two, or three but no more than four modifications, e.g., substitutions (e.g., conservative substitutions), relative to SEQ ID NOs: 1794, 1796, or 1798;

[0044] (ii) the nucleotide sequence encoding the cell penetrating peptide comprises the nucleotide sequence of any of SEQ ID NOs: 1793, 1795, or 1797, or a nucleotide sequence at least 80% (e.g., 85%, 90%, 92%, 95%, 96%, 97%, 98%, or 99%) identical thereto.

[0045] 14. The isolated nucleic acid of any one of embodiments 5-6 or 9-13, or the viral genome of any one of embodiments 8-13, wherein the encoded enhancement element comprises a lysosomal targeting sequence.

[0046] 15. The isolated nucleic of embodiment 6 or 14, or the viral genome of any one of embodiment 14, wherein:

[0047] (i) the encoded lysosomal targeting sequence comprises the amino acid sequence of any of SEQ ID NOs: 1800, 1802, 1804, 1806, or 1808, or an amino acid sequence having at least one, two, or three but no more than four modifications, e.g., substitutions (e.g., conservative substitutions), relative to SEQ ID NOs: 1800, 1802, 1804, 1806, or 1808;

[0048] (ii) the nucleotide sequence encoding the lysosomal targeting sequence comprises the nucleotide sequence of any of SEQ ID NO: 1799, 1801, 1803, 1805, or 1807, or a nucleotide sequence having at least one, two, or three but no more than four modifications, e.g., substitutions (e.g., conservative substitutions), relative to SEQ ID NOs: 1799, 1801, 1803, 1805, or 1807.

[0049] 16. The isolated nucleic acid of any one of embodiments 5-6 or 9-15, or the viral genome of any one of embodiments 8-15, wherein the nucleic acid encodes at least 2, 3, 4 or more enhancement elements.

[0050] 17. The isolated nucleic acid of any one of embodiments 5-6 or 9-16, or the viral genome of any one of embodiments 8-16, wherein the nucleic acid encodes two enhancement elements, wherein:

[0051] (i) the first enhancement element comprises a lysosomal targeting sequence, optionally wherein the lysosomal targeting sequence comprises the amino acid sequence of SEQ ID NO: 1802, or an amino acid sequence having at least one, two, or three but no more than four modifications, e.g., substitutions (e.g., conservative substitutions), relative to SEQ ID NO: 1802; and

[0052] (ii) the second enhancement element comprises Saposin C polypeptide or functional fragment or variant thereof, optionally wherein the Saposin C polypeptide or functional fragment or variant thereof comprises the amino acid sequence of SEQ ID NO: 1789, or an amino acid sequence having at least one, two, or three but no more than four modifications, e.g., substitutions (e.g., conservative substitutions), relative to SEQ ID NO: 1789.

[0053] 18. The isolated nucleic acid or viral genome of embodiment 17, wherein the nucleic acid encoding the first enhancement element and the second enhancement element, comprises the nucleotide sequences of 1801 and 1787, a nucleotide sequence at least 85% (e.g., at least 90%, 92%, 95%, 97%, 98%, or 99%) identical to SEQ ID NOs: 1801 and 1787, or a nucleotide sequence having at least one, two, or three but no more than four modifications, e.g., substitutions (e.g., conservative substitutions), relative to SEQ ID NOs: 1801 and 1787.

[0054] 19. The isolated nucleic acid of any one of embodiments 5-6 or 9-17, or the viral genome of any one of embodiments 8-18, wherein the nucleic acid encodes a first enhancement element and a second enhancement element, wherein:

[0055] (i) the first enhancement element a cell penetrating peptide, optionally wherein the cell penetrating peptide comprises the amino acid sequence of SEQ ID NO: 1798, or an amino acid sequence having at least one, two, or three but no more than four modifications, e.g., substitutions (e.g., conservative substitutions), relative to SEQ ID NO: 1798; and

[0056] (ii) the second enhancement element comprises a lysosomal targeting sequence, optionally wherein the lysosomal targeting sequence comprises the amino acid sequence of SEQ ID NO: 1802, or an amino acid sequence having at least one, two, or three but no more than four modifications, e.g., substitutions (e.g., conservative substitutions), relative to SEQ ID NO: 1802.

[0057] 20. The isolated nucleic acid or viral genome of embodiment 19, wherein the nucleic acid encoding the first enhancement element and the second enhancement element, comprises the nucleotide sequences of 1797 and 1801, a nucleotide sequence at least 85% (e.g., at least 90%, 92%, 95%, 97%, 98%, or 99%) identical to SEQ ID NOs: 1797 and 1801, or a nucleotide sequence having at least one, two, or three but no more than four modifications, e.g., substitutions (e.g., conservative substitutions), relative to SEQ ID NOs: 1797 and 1801.

[0058] 21. The isolated nucleic acid of any one of embodiments 5-6 or 9-20, or the viral genome of any one of embodiments 8-20, wherein the nucleic acid encodes a first enhancement element, a second enhancement element and a third enhancement element, wherein:

[0059] (i) the first enhancement element comprises a lysosomal targeting sequence, optionally wherein the lysosomal targeting sequence comprises the amino acid sequence of SEQ ID NO: 1802, or an amino acid sequence having at least one, two, or three but no more than four modifications, e.g., substitutions (e.g., conservative substitutions), relative to SEQ ID NO: 1802;

[0060] (ii) the second enhancement element comprises a cell penetrating peptide, optionally wherein the cell penetrating peptide comprises the amino acid sequence of SEQ ID NO: 1798, or an amino acid sequence having at least one, two, or three but no more than four modifications, e.g., substitutions (e.g., conservative substitutions), relative to SEQ ID NO: 1798; and

[0061] (iii) the third enhancement element comprises Saposin C polypeptide or functional fragment or variant thereof, optionally wherein the Saposin C polypeptide or functional fragment or variant thereof comprises amino acid sequence of SEQ ID NO: 1789, or an amino acid sequence having at least one, two, or three but no more than four modifications, e.g., substitutions (e.g., conservative substitutions), relative to SEQ ID NO: 1789.

[0062] 22. The isolated nucleic acid or viral genome of embodiment 21, wherein the nucleic acid encoding the first enhancement element, the second enhancement element, and the third enhancement element, comprises the nucleotide sequences of 1801, 1797, and 1787, a nucleotide sequence at least 85% (e.g., at least 90%, 92%, 95%, 97%, 98%, or 99%) identical to SEQ ID NOs: 1801, 1797, and 1787, or a nucleotide sequence having at least one, two, or three but no more than four modifications, e.g., substitutions (e.g., conservative substitutions), relative to SEQ ID NOs: 1801, 1797, and 1787.

[0063] 23. The isolated nucleic acid of any one of embodiments 1-6 or 9-22, or the viral genome of any one of embodiments 7-22, wherein the nucleic acid further encodes a linker.

[0064] 24. The isolated nucleic acid of any one of embodiments 5-6 or 9-22, or the viral genome of any one of embodiments 8-22, wherein the encoded enhancement element and the encoded GBA protein are connected directly, e.g., without a linker.

[0065] 25. The isolated nucleic acid of any one of embodiments 5-6 or 9-23, or the viral genome of any one of embodiments 8-23, wherein the encoded enhancement element and the encoded GBA protein are connected via the encoded linker.

[0066] 26. The isolated nucleic acid or viral genome of embodiment 23 or 25, wherein:

[0067] (i) the encoded linker comprises the amino acid sequence of any of SEQ ID NOs: 1854, 1855, 1843, or 1845, or an amino acid sequence having at least one, two, or three but no more than four modifications, e.g., substitutions (e.g., conservative substitutions), relative to SEQ ID NOs: 1854, 1855, 1843, or 1845;

[0068] (ii) the nucleotide sequence encoding the linker comprises any of the nucleotide sequences of Table 2, or a nucleotide sequence having at least one, two, or three but no more than four modifications, e.g., substitutions (e.g., conservative substitutions), relative to the sequences of Table 2;

[0069] (iii) the nucleotide sequence encoding the linker comprises the nucleotide sequence of any one of SEQ ID NOs: 1724, 1726, 1729, or 1730, or a nucleotide sequence having at least one, two, or three but no more than four modifications, e.g., substitutions (e.g., conservative substitutions), relative to SEQ ID NOs: 1724, 1726, 1729, or 1730;

[0070] (iv) the encoded linker comprises a furin cleavage site;

[0071] (v) the encoded linker comprises a T2A polypeptide;

[0072] (vi) the encoded linker comprises a (Gly4Ser)n linker (SEQ ID NO: 1871), wherein n is 1-10, e.g., n is 3, 4, or 5; and/or

[0073] (vii) the encoded linker comprises a (Gly4Ser)3 linker (SEQ ID NO: 1845).

[0074] 27. The isolated nucleic acid or the viral genome of any one of embodiments 23 or 25-26, wherein:

[0075] (i) the encoded linker comprises the amino acid sequence of SEQ ID NO: 1854 and/or the amino acid sequence of SEQ ID NO: 1855, or an amino acid sequence having at least one, two, or three but no more than four modifications, e.g., substitutions, relative to SEQ ID NO: 1854 and/or 1855; and/or

[0076] (ii) the nucleotide sequence encoding the linker comprises the nucleotide sequence of SEQ ID NO: 1724 and/or the nucleotide sequence of SEQ ID NO: 1726, or a nucleotide sequence having at least one, two, or three but no more than four modifications, e.g., substitutions, relative to SEQ ID NO: 1724 and/or 1726.

[0077] 28. The isolated nucleic acid of any one of embodiments 23 or 25-27, or the viral genome of any one of embodiments 23 or 25-26, wherein:

[0078] (i) the encoded linker comprises the amino acid sequence of SEQ ID NO: 1845, or an amino acid sequence having at least one, two, or three but no more than four modifications, e.g., substitutions, relative to SEQ ID NO: 1845;

[0079] (ii) the nucleotide sequence encoding the linker comprises the nucleotide sequence of SEQ ID NO: 1730, or a nucleotide sequence having at least one, two, or three but no more than four modifications, e.g., substitutions, relative to SEQ ID NO: 1730.

[0080] 29. The isolated nucleic acid of any one of embodiments 5-6 or 9-28, or the viral genome of any one of embodiments 8-28, wherein the encoded GBA protein and the encoded enhancement element are expressed as a single polypeptide.

[0081] 30. The isolated nucleic acid of any one of embodiments 5-6 or 9-28, or the viral genome of any one of embodiments 8-28, wherein the single polypeptide comprises a cleavage site present between the encoded GBA protein and the encoded enhancement element, optionally wherein the cleavage site is an T2A and/or a furin cleavage site.

[0082] 31. The isolated nucleic acid of any one of embodiments 5-6 or 9-30, or the viral genome of any one of embodiments 8-30, wherein:

[0083] (i) the nucleotide sequence encoding the enhancement element is located 5′ relative to the nucleotide sequence encoding the GBA protein; and/or

[0084] (ii) the nucleotide sequence encoding the enhancement element is located 3′ relative to the nucleotide sequence encoding the GBA protein.

[0085] 32. The isolated nucleic acid of any one of embodiments 1-6 or 9-31, or the viral genome of any one of embodiments 7-31, wherein the encoded GBA protein comprises the amino acid sequence of SEQ ID NO: 1775, or an amino acid sequence at least 70% (e.g., at least 75%, 80%, 85%, 90%, 92%, 95%, 97%, 98%, or 99%) identical thereto.

[0086] 33. The isolated nucleic acid of any one of embodiments 6 or 9-32, or the viral genome of any one of embodiments 7-32, wherein the nucleotide sequence encoding the GBA protein comprises the nucleotide sequence of any one of SEQ ID NOs: 1773, 1777, or 1781, or a nucleotide sequence at least 70% (e.g., at least 75%, 80%, 85%, 90%, 92%, 95%, 97%, 98%, or 99%) identical thereto.

[0087] 34. The isolated nucleic acid of any one of embodiments 1-6 or 9-33, or the viral genome of any one of embodiments 7-33, wherein the nucleotide sequence encoding the GBA protein comprises the nucleotide sequence of SEQ ID NO: 1773.

[0088] 35. The isolated nucleic acid of any one of embodiments 6 or 9-33, or the viral genome of any one of embodiments 7-33, wherein the nucleotide sequence encoding the GBA protein comprises the nucleotide sequence of SEQ ID NO: 1777.

[0089] 36. The isolated nucleic acid of any one of embodiments 6 or 9-33, or the viral genome of any one of embodiments 7-33, wherein the nucleotide sequence encoding the GBA protein comprises the nucleotide sequence of SEQ ID NO: 1781.

[0090] 37. The isolated nucleic acid of any one of embodiments 1-6 or 9-36, or the viral genome of any one of embodiments 7-36, wherein the nucleotide sequence encoding the GBA protein is codon optimized.

[0091] 38. The isolated nucleic acid of any one of embodiments 1-6 or 9-37, or the viral genome of any one of embodiments 7-37, further encoding a signal sequence.

[0092] 39. The isolated nucleic acid or the viral genome of embodiment 38, wherein the encoded signal sequence comprises the amino acid sequence of SEQ ID NO: 1853, or an amino acid sequence at least 85% (e.g., at least 90%, 92%, 95%, 97%, 98%, or 99%) identical thereto.

[0093] 40. The isolated nucleic acid or the viral genome of embodiment 38 or 39, wherein the encoded signal sequence comprises the amino acid sequence of SEQ ID NO: 1857, or an amino acid sequence at least 85% (e.g., at least 90%, 92%, 95%, 97%, 98%, or 99%) identical thereto.

[0094] 41. The isolated nucleic acid or the viral genome of any one of embodiments 38-40, wherein the nucleotide sequence encoding the signal sequence comprises the nucleotide sequence of any of SEQ ID NOs: 1850-1852 or 1856, or a nucleotide sequence at least 85% (e.g., at least 90%, 92%, 95%, 97%, 98%, or 99%) identical thereto.

[0095] 42. The isolated nucleic acid or the viral genome of any one of embodiments 38-41, wherein the nucleotide sequence encoding the signal sequence is located:

[0096] (i) 5′ relative to the nucleotide sequence encoding the GBA protein; and/or

[0097] (ii) 5′ relative to the encoded enhancement element.

[0098] 43. The isolated nucleic acid or the viral genome of any one of embodiments 38-42, wherein:

[0099] (i) the nucleotide sequence encoding the signal sequence comprises the nucleotide sequence of 1850 or a nucleotide sequence at least 85% (e.g., at least 90%, 92%, 95%, 97%, 98%, or 99%) identical thereto, and the nucleotide sequence encoding the GBA protein comprises the nucleotide sequence of SEQ ID NO: 1773, or a nucleotide sequence at least 70% (e.g., at least 75%, 80%, 85%, 90%, 92%, 95%, 97%, 98%, or 99%) identical thereto;

[0100] (ii) the nucleotide sequence encoding the signal sequence comprises the nucleotide sequence of 1851 or a nucleotide sequence at least 85% (e.g., at least 90%, 92%, 95%, 97%, 98%, or 99%) identical thereto, and the nucleotide sequence encoding the GBA protein comprises the nucleotide sequence of SEQ ID NO: 1777, or a nucleotide sequence at least 70% (e.g., at least 75%, 80%, 85%, 90%, 92%, 95%, 97%, 98%, or 99%) identical thereto;

[0101] (iii) the nucleotide sequence encoding the signal sequence comprises the nucleotide sequence of 1852 or a nucleotide sequence at least 85% (e.g., at least 90%, 92%, 95%, 97%, 98%, or 99%) identical thereto, and the nucleotide sequence encoding the GBA protein comprises the nucleotide sequence of SEQ ID NO: 1781, or a nucleotide sequence at least 70% (e.g., at least 75%, 80%, 85%, 90%, 92%, 95%, 97%, 98%, or 99%) identical thereto;

[0102] and optionally wherein the nucleotide sequence encoding the signal sequence is located 5′ relative to the nucleotide sequence encoding the GBA protein.

[0103] 44. The isolated nucleic acid or the viral genome of any one of embodiments 38-43, wherein the encoded signal sequence comprises the amino acid sequence of SEQ ID NO: 1853 or an amino acid sequence at least 85% (e.g., at least 90%, 92%, 95%, 97%, 98%, or 99%) identical thereto; and the encoded GBA protein comprises the amino acid sequence of SEQ ID NO: 1775, or an amino acid sequence at least 70% (e.g., at least 75%, 80%, 85%, 90%, 92%, 95%, 97%, 98%, or 99%) identical thereto;

[0104] and optionally wherein the encoded signal sequence is located N-terminal relative to the encoded GBA protein.

[0105] 45. The isolated nucleic acid or the viral genome of any one of embodiments 38-44, wherein:

[0106] (i) the nucleotide sequence encoding the signal sequence comprises the nucleotide sequence of any of SEQ ID NO: 1850-1852, or a nucleotide sequence at least 85% (e.g., at least 90%, 92%, 95%, 97%, 98%, or 99%) identical thereto; and the nucleotide sequence encoding the enhancement element comprises the nucleotide sequence of SEQ ID NO: 1801, or a nucleotide sequence at least 85% (e.g., at least 90%, 92%, 95%, 97%, 98%, or 99%) identical thereto; and optionally wherein the nucleotide sequence encoding the signal sequence is located 5′ relative to the nucleotide sequence encoding the enhancement element;

[0107] (ii) the encoded signal sequence comprises the amino acid sequence of SEQ ID NO: 1853, or an amino acid sequence at least 85% (e.g., at least 90%, 92%, 95%, 97%, 98%, or 99%) identical thereto; and the encoded enhancement element comprises the amino acid sequence of SEQ ID NO: 1802, or an amino acid sequence having at least one, two, or three but no more than four modifications, e.g., substitutions, relative to SEQ ID NO: 1802; and optionally wherein the encoded signal sequence is located N-terminal relative to the encoded enhancement element;

[0108] (iii) the nucleotide sequence encoding the signal sequence comprises the nucleotide sequence of SEQ ID NO: 1856, or a nucleotide sequence at least 85% (e.g., at least 90%, 92%, 95%, 97%, 98%, or 99%) identical thereto; and the nucleotide sequence encoding the enhancement element comprises the nucleotide sequence of SEQ ID NO: 1859, or a nucleotide sequence at least 85% (e.g., at least 90%, 92%, 95%, 97%, 98%, or 99%) identical thereto; and the nucleotide sequence encoding the enhancement element comprises the nucleotide sequence of SEQ ID NO: 1859; and optionally wherein the nucleotide sequence encoding the signal sequence is located 5′ relative to the nucleotide sequence encoding the enhancement element;

[0109] (iv) the encoded signal sequence comprises the amino acid sequence of SEQ ID NO: 1857, or an amino acid sequence at least 85% (e.g., at least 90%, 92%, 95%, 97%, 98%, or 99%) identical thereto; and the encoded enhancement element comprises the amino acid sequence of SEQ ID NO: 1785, or an amino acid sequence at least 85% (e.g., at least 90%, 92%, 95%, 97%, 98%, or 99%) identical thereto; and optionally wherein the encoded signal sequence is located N-terminal relative to the encoded enhancement element;

[0110] (v) the nucleotide sequence encoding the signal sequence comprises the nucleotide sequence of SEQ ID NO: 1856, or a nucleotide sequence at least 85% (e.g., at least 90%, 92%, 95%, 97%, 98%, or 99%) identical thereto; and the nucleotide sequence encoding the enhancement element comprises the nucleotide sequence of SEQ ID NO: 1787, or a nucleotide sequence at least 85% (e.g., at least 90%, 92%, 95%, 97%, 98%, or 99%) identical thereto; and the nucleotide sequence encoding the enhancement element comprises the nucleotide sequence of SEQ ID NO: 1787; and optionally wherein the nucleotide sequence encoding the signal sequence is located 5′ relative to the nucleotide sequence encoding the enhancement element;

[0111] (vi) the encoded signal sequence comprises the amino acid sequence of SEQ ID NO: 1857, or an amino acid sequence at least 85% (e.g., at least 90%, 92%, 95%, 97%, 98%, or 99%) identical thereto; and the encoded enhancement element comprises the amino acid sequence of SEQ ID NO: 1789, or an amino acid sequence having at least one, two, or three but no more than four modifications, e.g., substitutions, relative to SEQ ID NO: 1789; and optionally wherein the encoded signal sequence is located N-terminal relative to the encoded enhancement element;

[0112] (vii) the nucleotide sequence encoding the signal sequence comprises the nucleotide sequence of SEQ ID NO: 1856, or a nucleotide sequence at least 85% (e.g., at least 90%, 92%, 95%, 97%, 98%, or 99%) identical thereto; and the nucleotide sequence encoding the enhancement element comprises the nucleotide sequence of SEQ ID NO: 1791, or a nucleotide sequence at least 85% (e.g., at least 90%, 92%, 95%, 97%, 98%, or 99%) identical thereto; and the nucleotide sequence encoding the enhancement element comprises the nucleotide sequence of SEQ ID NO: 1791 and optionally wherein the nucleotide sequence encoding the signal sequence is located 5′ relative to the nucleotide sequence encoding the enhancement element;

[0113] (viii) the encoded signal sequence comprises the amino acid sequence of SEQ ID NO: 1857, or an amino acid sequence at least 85% (e.g., at least 90%, 92%, 95%, 97%, 98%, or 99%) identical thereto; and the encoded enhancement element comprises the amino acid sequence of SEQ ID NO: 1758, or an amino acid sequence having at least one, two, or three but no more than four modifications, e.g., substitutions, relative to SEQ ID NO: 1758; and optionally wherein the encoded signal sequence is located N-terminal relative to the encoded enhancement element;

[0114] (ix) the nucleotide sequence encoding a signal sequence comprising the nucleotide sequence of SEQ ID NO: 1852, or a nucleotide sequence at least 85% (e.g., at least 90%, 92%, 95%, 96%, 97%, 98%, or 99%) identical thereto; and the nucleotide sequence encoding an enhancement element comprising the nucleotide sequence of SEQ ID NO: 1793, or a nucleotide sequence at least 85% (e.g., at least 90%, 92%, 95%, 96%, 97%, 98%, or 99%) identical thereto; and optionally wherein the nucleotide sequence encoding the signal sequence is located 5′ relative to the nucleotide sequence encoding the enhancement element; and/or

[0115] (x) the encoded signal sequence comprises the amino acid sequence of SEQ ID NO: 1853, or an amino acid sequence at least 85% (e.g., at least 90%, 92%, 95%, 96%, 97%, 98%, or 99%) identical thereto; and the encoded enhancement element comprises the amino acid sequence of SEQ ID NO: 1794, or an amino acid sequence having at least one, two, or three but no more than four modifications, e.g., substitutions, relative to SEQ ID NO: 1794; and optionally wherein the encoded signal sequence is located N-terminal relative to the encoded enhancement element.

[0116] 46. The isolated nucleic acid of any one of embodiments 1-6 or 9-45, or the viral genome of any one of embodiments 7-45, wherein the nucleic acid comprises in 5′ to 3′ order: a nucleotide sequence encoding a signal sequence comprising the nucleotide sequence of SEQ ID NO: 1850, or a nucleotide sequence at least 85% (e.g., at least 90%, 92%, 95%, 96%, 97%, 98%, or 99%) identical thereto; and a nucleotide sequence encoding a GBA protein comprising the nucleotide sequence of SEQ ID NO: 1773, or a nucleotide sequence at least 85% (e.g., at least 90%, 92%, 95%, 96%, 97%, 98%, or 99%) identical thereto.

[0117] 47. The isolated nucleic acid of any one of embodiments 1-6 or 9-46, or the viral genome of any one of embodiments 7-46, wherein the nucleic acid comprises in 5′ to 3′ order:

[0118] (i) a nucleotide sequence encoding a signal sequence comprising the nucleotide sequence of SEQ ID NO: 1852, or a nucleotide sequence at least 85% (e.g., at least 90%, 92%, 95%, 96%, 97%, 98%, or 99%) identical thereto; and a nucleotide sequence encoding a GBA protein comprising the nucleotide sequence of SEQ ID NO: 1781, or a nucleotide sequence at least 85% (e.g., at least 90%, 92%, 95%, 96%, 97%, 98%, or 99%) identical thereto;

[0119] (ii) a nucleotide sequence encoding a signal sequence comprising the nucleotide sequence of SEQ ID NO: 1852, or a nucleotide sequence at least 85% (e.g., at least 90%, 92%, 95%, 96%, 97%, 98%, or 99%) identical thereto; a nucleotide sequence encoding a GBA protein comprising the nucleotide sequence of SEQ ID NO: 1781, or a nucleotide sequence at least 85% (e.g., at least 90%, 92%, 95%, 96%, 97%, 98%, or 99%) identical thereto; and a nucleotide sequence encoding an enhancement element comprising the nucleotide sequence of SEQ ID NO: 1799, or a nucleotide sequence at least 85% (e.g., at least 90%, 92%, 95%, 96%, 97%, 98%, or 99%) identical thereto;

[0120] (iii) a nucleotide sequence encoding a signal sequence comprising the nucleotide sequence of SEQ ID NO: 1852, or a nucleotide sequence at least 85% (e.g., at least 90%, 92%, 95%, 96%, 97%, 98%, or 99%) identical thereto; a nucleotide sequence encoding an enhancement element comprising the nucleotide sequence of SEQ ID NO: 1801, or a nucleotide sequence at least 85% (e.g., at least 90%, 92%, 95%, 96%, 97%, 98%, or 99%) identical thereto; and a nucleotide sequence encoding a GBA protein comprising the nucleotide sequence of SEQ ID NO: 1781, or a nucleotide sequence at least 85% (e.g., at least 90%, 92%, 95%, 96%, 97%, 98%, or 99%) identical thereto;

[0121] (iv) a nucleotide sequence encoding a signal sequence comprising the nucleotide sequence of SEQ ID NO: 1852, or a nucleotide sequence at least 85% (e.g., at least 90%, 92%, 95%, 96%, 97%, 98%, or 99%) identical thereto; a nucleotide sequence encoding a GBA protein comprising the nucleotide sequence of SEQ ID NO: 1781, or a nucleotide sequence at least 85% (e.g., at least 90%, 92%, 95%, 96%, 97%, 98%, or 99%) identical thereto; and a nucleotide sequence encoding an enhancement element comprising the nucleotide sequence of SEQ ID NO: 1803, or a nucleotide sequence at least 85% (e.g., at least 90%, 92%, 95%, 96%, 97%, 98%, or 99%) identical thereto;

[0122] (v) a nucleotide sequence encoding a signal sequence comprising the nucleotide sequence of SEQ ID NO: 1852, or a nucleotide sequence at least 85% (e.g., at least 90%, 92%, 95%, 96%, 97%, 98%, or 99%) identical thereto; a nucleotide sequence encoding a GBA protein comprising the nucleotide sequence of SEQ ID NO: 1781, or a nucleotide sequence at least 85% (e.g., at least 90%, 92%, 95%, 96%, 97%, 98%, or 99%) identical thereto; and a nucleotide sequence encoding an enhancement element comprising the nucleotide sequence of SEQ ID NO: 1805, or a nucleotide sequence at least 85% (e.g., at least 90%, 92%, 95%, 96%, 97%, 98%, or 99%) identical thereto;

[0123] (vi) a nucleotide sequence encoding a signal sequence comprising the nucleotide sequence of SEQ ID NO: 1852, or a nucleotide sequence at least 85% (e.g., at least 90%, 92%, 95%, 96%, 97%, 98%, or 99%) identical thereto; a nucleotide sequence encoding a GBA protein comprising the nucleotide sequence of SEQ ID NO: 1781, or a nucleotide sequence at least 85% (e.g., at least 90%, 92%, 95%, 96%, 97%, 98%, or 99%) identical thereto; a nucleotide sequence encoding a linker comprising the nucleotide sequence of SEQ ID NO: 1730, or a nucleotide sequence at least 85% (e.g., at least 90%, 92%, 95%, 96%, 97%, 98%, or 99%) identical thereto; and a nucleotide sequence encoding an enhancement element comprising the nucleotide sequence of SEQ ID NO: 1797, or a nucleotide sequence at least 85% (e.g., at least 90%, 92%, 95%, 96%, 97%, 98%, or 99%) identical thereto;

[0124] (vii) a nucleotide sequence encoding a signal sequence comprising the nucleotide sequence of SEQ ID NO: 1852, or a nucleotide sequence at least 85% (e.g., at least 90%, 92%, 95%, 96%, 97%, 98%, or 99%) identical thereto; a nucleotide sequence encoding a GBA protein comprising the nucleotide sequence of SEQ ID NO: 1781, or a nucleotide sequence at least 85% (e.g., at least 90%, 92%, 95%, 96%, 97%, 98%, or 99%) identical thereto; a nucleotide sequence encoding a linker comprising the nucleotide sequence of SEQ ID NO: 1730, or a nucleotide sequence at least 85% (e.g., at least 90%, 92%, 95%, 96%, 97%, 98%, or 99%) identical thereto; and a nucleotide sequence encoding an enhancement element comprising the nucleotide sequence of SEQ ID NO: 1793, or a nucleotide sequence at least 85% (e.g., at least 90%, 92%, 95%, 96%, 97%, 98%, or 99%) identical thereto;

[0125] (viii) a nucleotide sequence encoding a first signal sequence comprising the nucleotide sequence of SEQ ID NO: 1852, or a nucleotide sequence at least 85% (e.g., at least 90%, 92%, 95%, 96%, 97%, 98%, or 99%) identical thereto; a nucleotide sequence encoding a GBA protein comprising the nucleotide sequence of SEQ ID NO: 1781, or a nucleotide sequence at least 85% (e.g., at least 90%, 92%, 95%, 96%, 97%, 98%, or 99%) identical thereto; a nucleotide sequence encoding a furin cleavage site comprising the nucleotide sequence of SEQ ID NO: 1724, or a nucleotide sequence at least 85% (e.g., at least 90%, 92%, 95%, 96%, 97%, 98%, or 99%) identical thereto; a nucleotide sequence encoding a T2A polypeptide comprising the nucleotide sequence of SEQ ID NO: 1726, or a nucleotide sequence at least 85% (e.g., at least 90%, 92%, 95%, 96%, 97%, 98%, or 99%) identical thereto; a nucleotide sequence encoding a second signal sequence comprising the nucleotide sequence of SEQ ID NO: 1856, or a nucleotide sequence at least 85% (e.g., at least 90%, 92%, 95%, 96%, 97%, 98%, or 99%) identical thereto; and a nucleotide sequence encoding an enhancement element comprising the nucleotide sequence of SEQ ID NO: 1859, or a nucleotide sequence at least 85% (e.g., at least 90%, 92%, 95%, 96%, 97%, 98%, or 99%) identical thereto;

[0126] (ix) a nucleotide sequence encoding a first signal sequence comprising the nucleotide sequence of SEQ ID NO: 1852, or a nucleotide sequence at least 85% (e.g., at least 90%, 92%, 95%, 96%, 97%, 98%, or 99%) identical thereto; a nucleotide sequence encoding a GBA protein comprising the nucleotide sequence of SEQ ID NO: 1781, or a nucleotide sequence at least 85% (e.g., at least 90%, 92%, 95%, 96%, 97%, 98%, or 99%) identical thereto; a nucleotide sequence encoding a furin cleavage site comprising the nucleotide sequence of SEQ ID NO: 1724, or a nucleotide sequence at least 85% (e.g., at least 90%, 92%, 95%, 96%, 97%, 98%, or 99%) identical thereto; a nucleotide sequence encoding a T2A polypeptide comprising the nucleotide sequence of SEQ ID NO: 1726, or a nucleotide sequence at least 85% (e.g., at least 90%, 92%, 95%, 96%, 97%, 98%, or 99%) identical thereto; a nucleotide sequence encoding a second signal sequence comprising the nucleotide sequence of SEQ ID NO: 1856, or a nucleotide sequence at least 85% (e.g., at least 90%, 92%, 95%, 96%, 97%, 98%, or 99%) identical thereto; and a nucleotide sequence encoding an enhancement element comprising the nucleotide sequence of SEQ ID NO: 1787, or a nucleotide sequence at least 85% (e.g., at least 90%, 92%, 95%, 96%, 97%, 98%, or 99%) identical thereto;

[0127] (x) a nucleotide sequence encoding a first signal sequence comprising the nucleotide sequence of SEQ ID NO: 1852, or a nucleotide sequence at least 85% (e.g., at least 90%, 92%, 95%, 96%, 97%, 98%, or 99%) identical thereto; a nucleotide sequence encoding a GBA protein comprising the nucleotide sequence of SEQ ID NO: 1781, or a nucleotide sequence at least 85% (e.g., at least 90%, 92%, 95%, 96%, 97%, 98%, or 99%) identical thereto; a nucleotide sequence encoding a furin cleavage site comprising the nucleotide sequence of SEQ ID NO: 1724, or a nucleotide sequence at least 85% (e.g., at least 90%, 92%, 95%, 96%, 97%, 98%, or 99%) identical thereto; a nucleotide sequence encoding a T2A polypeptide comprising the nucleotide sequence of SEQ ID NO: 1726, or a nucleotide sequence at least 85% (e.g., at least 90%, 92%, 95%, 96%, 97%, 98%, or 99%) identical thereto; a nucleotide sequence encoding a second signal sequence comprising the nucleotide sequence of SEQ ID NO: 1856, or a nucleotide sequence at least 85% (e.g., at least 90%, 92%, 95%, 96%, 97%, 98%, or 99%) identical thereto; and a nucleotide sequence encoding an enhancement element comprising the nucleotide sequence of SEQ ID NO: 1791, or a nucleotide sequence at least 85% (e.g., at least 90%, 92%, 95%, 96%, 97%, 98%, or 99%) identical thereto;

[0128] (xi) a nucleotide sequence encoding a signal sequence comprising the nucleotide sequence of SEQ ID NO: 1852, or a nucleotide sequence at least 85% (e.g., at least 90%, 92%, 95%, 96%, 97%, 98%, or 99%) identical thereto; a nucleotide sequence encoding a GBA protein comprising the nucleotide sequence of SEQ ID NO: 1781, or a nucleotide sequence at least 85% (e.g., at least 90%, 92%, 95%, 96%, 97%, 98%, or 99%) identical thereto; a nucleotide sequence encoding a linker comprising the nucleotide sequence of SEQ ID NO: 1730, or a nucleotide sequence at least 85% (e.g., at least 90%, 92%, 95%, 96%, 97%, 98%, or 99%) identical thereto; and a nucleotide sequence encoding an enhancement element comprising the nucleotide sequence of SEQ ID NO: 1795, or a nucleotide sequence at least 85% (e.g., at least 90%, 92%, 95%, 96%, 97%, 98%, or 99%) identical thereto;

[0129] (xii) a nucleotide sequence encoding a signal sequence comprising the nucleotide sequence of SEQ ID NO: 1852, or a nucleotide sequence at least 85% (e.g., at least 90%, 92%, 95%, 96%, 97%, 98%, or 99%) identical thereto; a nucleotide sequence encoding an enhancement element comprising the nucleotide sequence of SEQ ID NO: 1793, or a nucleotide sequence at least 85% (e.g., at least 90%, 92%, 95%, 96%, 97%, 98%, or 99%) identical thereto; a nucleotide sequence encoding a linker comprising the nucleotide sequence of SEQ ID NO: 1730, or a nucleotide sequence at least 85% (e.g., at least 90%, 92%, 95%, 96%, 97%, 98%, or 99%) identical thereto; and a nucleotide sequence encoding a GBA protein comprising the nucleotide sequence of SEQ ID NO: 1781, or a nucleotide sequence at least 85% (e.g., at least 90%, 92%, 95%, 96%, 97%, 98%, or 99%) identical thereto;

[0130] (xiii) a nucleotide sequence encoding a signal sequence comprising the nucleotide sequence of SEQ ID NO: 1852, or a nucleotide sequence at least 85% (e.g., at least 90%, 92%, 95%, 96%, 97%, 98%, or 99%) identical thereto; a nucleotide sequence encoding a GBA protein comprising the nucleotide sequence of SEQ ID NO: 1781, or a nucleotide sequence at least 85% (e.g., at least 90%, 92%, 95%, 96%, 97%, 98%, or 99%) identical thereto; and a nucleotide sequence encoding an enhancement element comprising the nucleotide sequence of SEQ ID NO: 1807, or a nucleotide sequence at least 85% (e.g., at least 90%, 92%, 95%, 96%, 97%, 98%, or 99%) identical thereto;

[0131] (xiv) a nucleotide sequence encoding a first signal sequence comprising the nucleotide sequence of SEQ ID NO: 1852, or a nucleotide sequence at least 85% (e.g., at least 90%, 92%, 95%, 96%, 97%, 98%, or 99%) identical thereto; a nucleotide sequence encoding a first enhancement element comprising the nucleotide sequence of SEQ ID NO: 1801, or a nucleotide sequence at least 85% (e.g., at least 90%, 92%, 95%, 96%, 97%, 98%, or 99%) identical thereto; a nucleotide sequence encoding a GBA protein comprising the nucleotide sequence of SEQ ID NO: 1781, or a nucleotide sequence at least 85% (e.g., at least 90%, 92%, 95%, 96%, 97%, 98%, or 99%) identical thereto; a nucleotide sequence encoding a furin cleavage site comprising the nucleotide sequence of SEQ ID NO: 1724, or a nucleotide sequence at least 85% (e.g., at least 90%, 92%, 95%, 96%, 97%, 98%, or 99%) identical thereto; a nucleotide sequence encoding a T2A polypeptide comprising the nucleotide sequence of SEQ ID NO: 1726, or a nucleotide sequence at least 85% (e.g., at least 90%, 92%, 95%, 96%, 97%, 98%, or 99%) identical thereto; a nucleotide sequence encoding a second signal sequence comprising the nucleotide sequence of SEQ ID NO: 1856, or a nucleotide sequence at least 85% (e.g., at least 90%, 92%, 95%, 96%, 97%, 98%, or 99%) identical thereto; and a nucleotide sequence encoding a second enhancement element comprising the nucleotide sequence of SEQ ID NO: 1787, or a nucleotide sequence at least 85% (e.g., at least 90%, 92%, 95%, 96%, 97%, 98%, or 99%) identical thereto;

[0132] (xv) a nucleotide sequence encoding a first signal sequence comprising the nucleotide sequence of SEQ ID NO: 1852, or a nucleotide sequence at least 85% (e.g., at least 90%, 92%, 95%, 96%, 97%, 98%, or 99%) identical thereto; a nucleotide sequence encoding a GBA protein comprising the nucleotide sequence of SEQ ID NO: 1781, or a nucleotide sequence at least 85% (e.g., at least 90%, 92%, 95%, 96%, 97%, 98%, or 99%) identical thereto; a nucleotide sequence encoding a linker comprising the nucleotide sequence of SEQ ID NO: 1730, or a nucleotide sequence at least 85% (e.g., at least 90%, 92%, 95%, 96%, 97%, 98%, or 99%) identical thereto; a nucleotide sequence encoding a first enhancement element comprising the nucleotide sequence of SEQ ID NO: 1797, or a nucleotide sequence at least 85% (e.g., at least 90%, 92%, 95%, 96%, 97%, 98%, or 99%) identical thereto; a nucleotide sequence encoding a furin cleavage site comprising the nucleotide sequence of SEQ ID NO: 1724, or a nucleotide sequence at least 85% (e.g., at least 90%, 92%, 95%, 96%, 97%, 98%, or 99%) identical thereto; a nucleotide sequence encoding a T2A polypeptide comprising the nucleotide sequence of SEQ ID NO: 1726, or a nucleotide sequence at least 85% (e.g., at least 90%, 92%, 95%, 96%, 97%, 98%, or 99%) identical thereto; a nucleotide sequence encoding a second signal sequence comprising the nucleotide sequence of SEQ ID NO: 1856, or a nucleotide sequence at least 85% (e.g., at least 90%, 92%, 95%, 96%, 97%, 98%, or 99%) identical thereto; and a nucleotide sequence encoding a second enhancement element comprising the nucleotide sequence of SEQ ID NO: 1787, or a nucleotide sequence at least 85% (e.g., at least 90%, 92%, 95%, 96%, 97%, 98%, or 99%) identical thereto;

[0133] (xvi) a nucleotide sequence encoding a first signal sequence comprising the nucleotide sequence of SEQ ID NO: 1852, or a nucleotide sequence at least 85% (e.g., at least 90%, 92%, 95%, 96%, 97%, 98%, or 99%) identical thereto; a nucleotide sequence encoding a first enhancement element comprising the nucleotide sequence of SEQ ID NO: 1801, or a nucleotide sequence at least 85% (e.g., at least 90%, 92%, 95%, 96%, 97%, 98%, or 99%) identical thereto; a nucleotide sequence encoding a GBA protein comprising the nucleotide sequence of SEQ ID NO: 1781, or a nucleotide sequence at least 85% (e.g., at least 90%, 92%, 95%, 96%, 97%, 98%, or 99%) identical thereto; a nucleotide sequence encoding a linker comprising the nucleotide sequence of SEQ ID NO: 1730, or a nucleotide sequence at least 85% (e.g., at least 90%, 92%, 95%, 96%, 97%, 98%, or 99%) identical thereto; a nucleotide sequence encoding a first enhancement element comprising the nucleotide sequence of SEQ ID NO: 1797, or a nucleotide sequence at least 85% (e.g., at least 90%, 92%, 95%, 96%, 97%, 98%, or 99%) identical thereto; a nucleotide sequence encoding a furin cleavage site comprising the nucleotide sequence of SEQ ID NO: 1724, or a nucleotide sequence at least 85% (e.g., at least 90%, 92%, 95%, 96%, 97%, 98%, or 99%) identical thereto; a nucleotide sequence encoding a T2A polypeptide comprising the nucleotide sequence of SEQ ID NO: 1726, or a nucleotide sequence at least 85% (e.g., at least 90%, 92%, 95%, 96%, 97%, 98%, or 99%) identical thereto; a nucleotide sequence encoding a second signal sequence comprising the nucleotide sequence of SEQ ID NO: 1856, or a nucleotide sequence at least 85% (e.g., at least 90%, 92%, 95%, 96%, 97%, 98%, or 99%) identical thereto; and a nucleotide sequence encoding a second enhancement element comprising the nucleotide sequence of SEQ ID NO: 1787, or a nucleotide sequence at least 85% (e.g., at least 90%, 92%, 95%, 96%, 97%, 98%, or 99%) identical thereto;

[0134] (xvii) a nucleotide sequence encoding a signal sequence comprising the nucleotide sequence of SEQ ID NO: 1851, or a nucleotide sequence at least 85% (e.g., at least 90%, 92%, 95%, 96%, 97%, 98%, or 99%) identical thereto; and a nucleotide sequence encoding a GBA protein comprising the nucleotide sequence of SEQ ID NO: 1777, or a nucleotide sequence at least 85% (e.g., at least 90%, 92%, 95%, 96%, 97%, 98%, or 99%) identical thereto;

[0135] (xviii) a nucleotide sequence encoding a first signal sequence comprising the nucleotide sequence of SEQ ID NO: 1851, or a nucleotide sequence at least 85% (e.g., at least 90%, 92%, 95%, 96%, 97%, 98%, or 99%) identical thereto; a nucleotide sequence encoding a GBA protein comprising the nucleotide sequence of SEQ ID NO: 1777, or a nucleotide sequence at least 85% (e.g., at least 90%, 92%, 95%, 96%, 97%, 98%, or 99%) identical thereto; a nucleotide sequence encoding a furin cleavage site comprising the nucleotide sequence of SEQ ID NO: 1724, or a nucleotide sequence at least 85% (e.g., at least 90%, 92%, 95%, 96%, 97%, 98%, or 99%) identical thereto; a nucleotide sequence encoding a T2A polypeptide comprising the nucleotide sequence of SEQ ID NO: 1726, or a nucleotide sequence at least 85% (e.g., at least 90%, 92%, 95%, 96%, 97%, 98%, or 99%) identical thereto; a nucleotide sequence encoding a second signal sequence comprising the nucleotide sequence of SEQ ID NO: 1856, or a nucleotide sequence at least 85% (e.g., at least 90%, 92%, 95%, 96%, 97%, 98%, or 99%) identical thereto; and a nucleotide sequence encoding an enhancement element comprising the nucleotide sequence of SEQ ID NO: 1787, or a nucleotide sequence at least 85% (e.g., at least 90%, 92%, 95%, 96%, 97%, 98%, or 99%) identical thereto;

[0136] (xix) a nucleotide sequence encoding a signal sequence comprising the nucleotide sequence of SEQ ID NO: 1851, or a nucleotide sequence at least 85% (e.g., at least 90%, 92%, 95%, 96%, 97%, 98%, or 99%) identical thereto; a nucleotide sequence encoding a GBA protein comprising the nucleotide sequence of SEQ ID NO: 1777, or a nucleotide sequence at least 85% (e.g., at least 90%, 92%, 95%, 96%, 97%, 98%, or 99%) identical thereto; a nucleotide sequence encoding a linker comprising the nucleotide sequence of SEQ ID NO: 1730, or a nucleotide sequence at least 85% (e.g., at least 90%, 92%, 95%, 96%, 97%, 98%, or 99%) identical thereto; and a nucleotide sequence encoding an enhancement element comprising the nucleotide sequence of SEQ ID NO: 1797, or a nucleotide sequence at least 85% (e.g., at least 90%, 92%, 95%, 96%, 97%, 98%, or 99%) identical thereto;

[0137] (xx) a nucleotide sequence encoding a signal sequence comprising the nucleotide sequence of SEQ ID NO: 1851, or a nucleotide sequence at least 85% (e.g., at least 90%, 92%, 95%, 96%, 97%, 98%, or 99%) identical thereto; a nucleotide sequence encoding an enhancement element comprising the nucleotide sequence of SEQ ID NO: 1801, or a nucleotide sequence at least 85% (e.g., at least 90%, 92%, 95%, 96%, 97%, 98%, or 99%) identical thereto; and a nucleotide sequence encoding a GBA protein comprising the nucleotide sequence of SEQ ID NO: 1777, or a nucleotide sequence at least 85% (e.g., at least 90%, 92%, 95%, 96%, 97%, 98%, or 99%) identical thereto;

[0138] (xxi) a nucleotide sequence encoding a signal sequence comprising the nucleotide sequence of SEQ ID NO: 1851, or a nucleotide sequence at least 85% (e.g., at least 90%, 92%, 95%, 96%, 97%, 98%, or 99%) identical thereto; a nucleotide sequence encoding a GBA protein comprising the nucleotide sequence of SEQ ID NO: 1777, or a nucleotide sequence at least 85% (e.g., at least 90%, 92%, 95%, 96%, 97%, 98%, or 99%) identical thereto; and a nucleotide sequence encoding an enhancement element comprising the nucleotide sequence of SEQ ID NO: 1805, or a nucleotide sequence at least 85% (e.g., at least 90%, 92%, 95%, 96%, 97%, 98%, or 99%) identical thereto;

[0139] (xxii) a nucleotide sequence encoding a first signal sequence comprising the nucleotide sequence of SEQ ID NO: 1850, or a nucleotide sequence at least 85% (e.g., at least 90%, 92%, 95%, 96%, 97%, 98%, or 99%) identical thereto; a nucleotide sequence encoding a GBA protein comprising the nucleotide sequence of SEQ ID NO: 1773, or a nucleotide sequence at least 85% (e.g., at least 90%, 92%, 95%, 96%, 97%, 98%, or 99%) identical thereto; a nucleotide sequence encoding a furin cleavage site comprising the nucleotide sequence of SEQ ID NO: 1724, or a nucleotide sequence at least 85% (e.g., at least 90%, 92%, 95%, 96%, 97%, 98%, or 99%) identical thereto; a nucleotide sequence encoding a T2A polypeptide comprising the nucleotide sequence of SEQ ID NO: 1726, or a nucleotide sequence at least 85% (e.g., at least 90%, 92%, 95%, 96%, 97%, 98%, or 99%) identical thereto; a nucleotide sequence encoding a second signal sequence comprising the nucleotide sequence of SEQ ID NO: 1856, or a nucleotide sequence at least 85% (e.g., at least 90%, 92%, 95%, 96%, 97%, 98%, or 99%) identical thereto; and a nucleotide sequence encoding an enhancement element comprising the nucleotide sequence of SEQ ID NO: 1787, or a nucleotide sequence at least 85% (e.g., at least 90%, 92%, (xxiii) a nucleotide sequence encoding a signal sequence comprising the nucleotide sequence of SEQ ID NO: 1850, or a nucleotide sequence at least 85% (e.g., at least 90%, 92%, 95%, 96%, 97%, 98%, or 99%) identical thereto; a nucleotide sequence encoding a GBA protein comprising the nucleotide sequence of SEQ ID NO: 1773, or a nucleotide sequence at least 85% (e.g., at least 90%, 92%, 95%, 96%, 97%, 98%, or 99%) identical thereto; a nucleotide sequence encoding a linker comprising the nucleotide sequence of SEQ ID NO: 1730, or a nucleotide sequence at least 85% (e.g., at least 90%, 92%, 95%, 96%, 97%, 98%, or 99%) identical thereto; and a nucleotide sequence encoding an enhancement element comprising the nucleotide sequence of SEQ ID NO: 1797, or a nucleotide sequence at least 85% (e.g., at least 90%, 92%, 95%, 96%, 97%, 98%, or 99%) identical thereto;

[0140] (xxiv) a nucleotide sequence encoding a signal sequence comprising the nucleotide sequence of SEQ ID NO: 1850, or a nucleotide sequence at least 85% (e.g., at least 90%, 92%, 95%, 96%, 97%, 98%, or 99%) identical thereto; a nucleotide sequence encoding an enhancement element comprising the nucleotide sequence of SEQ ID NO: 1801, or a nucleotide sequence at least 85% (e.g., at least 90%, 92%, 95%, 96%, 97%, 98%, or 99%) identical thereto; and a nucleotide sequence encoding a GBA protein comprising the nucleotide sequence of SEQ ID NO: 1773, or a nucleotide sequence at least 85% (e.g., at least 90%, 92%, 95%, 96%, 97%, 98%, or 99%) identical thereto;

[0141] (xxv) a nucleotide sequence encoding a signal sequence comprising the nucleotide sequence of SEQ ID NO: 1850, or a nucleotide sequence at least 85% (e.g., at least 90%, 92%, 95%, 96%, 97%, 98%, or 99%) identical thereto; a nucleotide sequence encoding a GBA protein comprising the nucleotide sequence of SEQ ID NO: 1773, or a nucleotide sequence at least 85% (e.g., at least 90%, 92%, 95%, 96%, 97%, 98%, or 99%) identical thereto; and a nucleotide sequence encoding an enhancement element comprising the nucleotide sequence of SEQ ID NO: 1805, or a nucleotide sequence at least 85% (e.g., at least 90%, 92%, 95%, 96%, 97%, 98%, or 99%) identical thereto;

[0142] (xxvi) a nucleotide sequence encoding a signal sequence comprising the nucleotide sequence of SEQ ID NO: 1851, or a nucleotide sequence at least 85% (e.g., at least 90%, 92%, 95%, 96%, 97%, 98%, or 99%) identical thereto; a nucleotide sequence encoding a GBA protein comprising the nucleotide sequence of SEQ ID NO: 1777, or a nucleotide sequence at least 85% (e.g., at least 90%, 92%, 95%, 96%, 97%, 98%, or 99%) identical thereto; a nucleotide sequence encoding a linker comprising the nucleotide sequence of SEQ ID NO: 1730, or a nucleotide sequence at least 85% (e.g., at least 90%, 92%, 95%, 96%, 97%, 98%, or 99%) identical thereto; and a nucleotide sequence encoding an enhancement element comprising the nucleotide sequence of SEQ ID NO: 1793, or a nucleotide sequence at least 85% (e.g., at least 90%, 92%, 95%, 96%, 97%, 98%, or 99%) identical thereto; or

[0143] (xxvii) a nucleotide sequence encoding a signal sequence comprising the nucleotide sequence of SEQ ID NO: 1850, or a nucleotide sequence at least 85% (e.g., at least 90%, 92%, 95%, 96%, 97%, 98%, or 99%) identical thereto; a nucleotide sequence encoding a GBA protein comprising the nucleotide sequence of SEQ ID NO: 1773, or a nucleotide sequence at least 85% (e.g., at least 90%, 92%, 95%, 96%, 97%, 98%, or 99%) identical thereto; a nucleotide sequence encoding a linker comprising the nucleotide sequence of SEQ ID NO: 1730, or a nucleotide sequence at least 85% (e.g., at least 90%, 92%, 95%, 96%, 97%, 98%, or 99%) identical thereto; and a nucleotide sequence encoding an enhancement element comprising the nucleotide sequence of SEQ ID NO: 1793, or a nucleotide sequence at least 85% (e.g., at least 90%, 92%, 95%, 96%, 97%, 98%, or 99%) identical thereto.

[0144] 48. The isolated nucleic acid of any one of embodiments 1-6 or 9-47, or the viral genome of any one of embodiments 7-47, wherein the nucleic acid encodes in 5′ to 3′ order: a signal sequence comprising the amino acid sequence of SEQ ID NO: 1853, or an amino acid sequence at least 85% (e.g., at least 90%, 92%, 95%, 96%, 97%, 98%, or 99%) identical thereto; and a GBA protein comprising the amino acid sequence of SEQ ID NO: 1775, or an amino acid sequence at least 85% (e.g., at least 90%, 92%, 95%, 96%, 97%, 98%, or 99%) identical thereto.

[0145] 49. The isolated nucleic acid of any one of embodiments 1-6 or 9-48, or the viral genome of any one of embodiments 7-48, wherein the nucleic acid encodes in 5′ to 3′ order:

[0146] (i) a signal sequence comprising the amino acid sequence of SEQ ID NO: 1853, or an amino acid sequence at least 85% (e.g., at least 90%, 92%, 95%, 96%, 97%, 98%, or 99%) identical thereto; a GBA protein comprising the amino acid sequence of SEQ ID NO: 1775, or an amino acid sequence at least 85% (e.g., at least 90%, 92%, 95%, 96%, 97%, 98%, or 99%) identical thereto; and an enhancement element comprising the amino acid sequence of SEQ ID NO: 1800, or an amino acid sequence having at least one, two, or three but no more than four modifications, e.g., substitutions, relative to SEQ ID NO: 1800;

[0147] (ii) a signal sequence comprising the amino acid sequence of SEQ ID NO: 1853, or an amino acid sequence at least 85% (e.g., at least 90%, 92%, 95%, 96%, 97%, 98%, or 99%) identical thereto; an enhancement element comprising the amino acid sequence of SEQ ID NO: 1802, or an amino acid sequence at least 85% (e.g., at least 90%, 92%, 95%, 96%, 97%, 98%, or 99%) identical thereto; and a GBA protein comprising the amino acid sequence of SEQ ID NO: 1775, or an amino acid sequence at least 85% (e.g., at least 90%, 92%, 95%, 96%, 97%, 98%, or 99%) identical thereto;

[0148] (iii) a signal sequence comprising the amino acid sequence of SEQ ID NO: 1853, or an amino acid sequence at least 85% (e.g., at least 90%, 92%, 95%, 96%, 97%, 98%, or 99%) identical thereto; a GBA protein comprising the amino acid sequence of SEQ ID NO: 1775, or an amino acid sequence at least 85% (e.g., at least 90%, 92%, 95%, 96%, 97%, 98%, or 99%) identical thereto; and an enhancement element comprising the amino acid sequence of SEQ ID NO: 1804, or an amino acid sequence having at least one, two, or three but no more than four modifications, e.g., substitutions, relative to SEQ ID NO: 1804;

[0149] (iv) a signal sequence comprising the amino acid sequence of SEQ ID NO: 1853, or an amino acid sequence at least 85% (e.g., at least 90%, 92%, 95%, 96%, 97%, 98%, or 99%) identical thereto; a GBA protein comprising the amino acid sequence of SEQ ID NO: 1775, or an amino acid sequence at least 85% (e.g., at least 90%, 92%, 95%, 96%, 97%, 98%, or 99%) identical thereto; and an enhancement element comprising the amino acid sequence of SEQ ID NO: 1806, or an amino acid sequence having at least one, two, or three but no more than four modifications, e.g., substitutions, relative to SEQ ID NO: 1806;

[0150] (v) a signal sequence comprising the amino acid sequence of SEQ ID NO: 1853, or an amino acid sequence at least 85% (e.g., at least 90%, 92%, 95%, 96%, 97%, 98%, or 99%) identical thereto; a GBA protein comprising the amino acid sequence of SEQ ID NO: 1775, or an amino acid sequence at least 85% (e.g., at least 90%, 92%, 95%, 96%, 97%, 98%, or 99%) identical thereto; a linker comprising the amino acid sequence of SEQ ID NO: 1845, or an amino acid sequence having at least one, two, or three but no more than four modifications, e.g., substitutions, relative to SEQ ID NO: 1845; and an enhancement element comprising the amino acid sequence of SEQ ID NO: 1798, or an amino acid sequence having at least one, two, or three but no more than four modifications, e.g., substitutions, relative to SEQ ID NO: 1798;

[0151] (vi) a signal sequence comprising the amino acid sequence of SEQ ID NO: 1853, or an amino acid sequence at least 85% (e.g., at least 90%, 92%, 95%, 96%, 97%, 98%, or 99%) identical thereto; a GBA protein comprising the amino acid sequence of SEQ ID NO: 1775, or an amino acid sequence at least 85% (e.g., at least 90%, 92%, 95%, 96%, 97%, 98%, or 99%) identical thereto; a linker comprising the amino acid sequence of SEQ ID NO: 1845, or an amino acid sequence having at least one, two, or three but no more than four modifications, e.g., substitutions, relative to SEQ ID NO: 1845; and an enhancement element comprising the amino acid sequence of SEQ ID NO: 1794, or an amino acid sequence having at least one, two, or three but no more than four modifications, e.g., substitutions, relative to SEQ ID NO: 1794;

[0152] (vii) a first signal sequence comprising the amino acid sequence of SEQ ID NO: 1853, or an amino acid sequence at least 85% (e.g., at least 90%, 92%, 95%, 96%, 97%, 98%, or 99%) identical thereto; a GBA protein comprising the amino acid sequence of SEQ ID NO: 1775, or an amino acid sequence at least 85% (e.g., at least 90%, 92%, 95%, 96%, 97%, 98%, or 99%) identical thereto; a furin cleavage site comprising the amino acid sequence of SEQ ID NO: 1854, or an amino acid sequence having at least one, two, or three but no more than four modifications, e.g., substitutions, relative to SEQ ID NO: 1854; a T2A polypeptide comprising the amino acid sequence of SEQ ID NO: 1855, or an amino acid sequence having at least one, two, or three but no more than four modifications, e.g., substitutions, relative to SEQ ID NO: 1855; a second signal sequence comprising the nucleotide sequence of SEQ ID NO: 1857, or an amino acid sequence having at least one, two, or three but no more than four modifications, e.g., substitutions, relative to SEQ ID NO: 1857; and an enhancement element comprising the amino acid sequence of SEQ ID NO: 1785, or an amino acid sequence at least 85% (e.g., at least 90%, 92%, 95%, 96%, 97%, 98%, or 99%) identical thereto;

[0153] (viii) a first signal sequence comprising the amino acid sequence of SEQ ID NO: 1853, or an amino acid sequence at least 85% (e.g., at least 90%, 92%, 95%, 96%, 97%, 98%, or 99%) identical thereto; a GBA protein comprising the amino acid sequence of SEQ ID NO: 1775, or an amino acid sequence at least 85% (e.g., at least 90%, 92%, 95%, 96%, 97%, 98%, or 99%) identical thereto; a furin cleavage site comprising the amino acid sequence of SEQ ID NO: 1854, or an amino acid sequence having at least one, two, or three but no more than four modifications, e.g., substitutions, relative to SEQ ID NO: 1854; a T2A polypeptide comprising the amino acid sequence of SEQ ID NO: 1855, or an amino acid sequence having at least one, two, or three but no more than four modifications, e.g., substitutions, relative to SEQ ID NO: 1855; a second signal sequence comprising the nucleotide sequence of SEQ ID NO: 1857, or an amino acid sequence having at least one, two, or three but no more than four modifications, e.g., substitutions, relative to SEQ ID NO: 1857; and an enhancement element comprising the amino acid sequence of SEQ ID NO: 1789, or an amino acid sequence at least 85% (e.g., at least 90%, 92%, 95%, 96%, 97%, 98%, or 99%) identical thereto;

[0154] (ix) a first signal sequence comprising the amino acid sequence of SEQ ID NO: 1853, or an amino acid sequence at least 85% (e.g., at least 90%, 92%, 95%, 96%, 97%, 98%, or 99%) identical thereto; a GBA protein comprising the amino acid sequence of SEQ ID NO: 1775, or an amino acid sequence at least 85% (e.g., at least 90%, 92%, 95%, 96%, 97%, 98%, or 99%) identical thereto; a furin cleavage site comprising the amino acid sequence of SEQ ID NO: 1854, or an amino acid sequence having at least one, two, or three but no more than four modifications, e.g., substitutions, relative to SEQ ID NO: 1854; a T2A polypeptide comprising the amino acid sequence of SEQ ID NO: 1855, or an amino acid sequence having at least one, two, or three but no more than four modifications, e.g., substitutions, relative to SEQ ID NO: 1855; a second signal sequence comprising the nucleotide sequence of SEQ ID NO: 1857, or an amino acid sequence having at least one, two, or three but no more than four modifications, e.g., substitutions, relative to SEQ ID NO: 1857; and an enhancement element comprising the amino acid sequence of SEQ ID NO: 1758, or an amino acid sequence at least 85% (e.g., at least 90%, 92%, 95%, 96%, 97%, 98%, or 99%) identical thereto;

[0155] (x) a signal sequence comprising the amino acid sequence of SEQ ID NO: 1853, or an amino acid sequence at least 85% (e.g., at least 90%, 92%, 95%, 96%, 97%, 98%, or 99%) identical thereto; a GBA protein comprising the amino acid sequence of SEQ ID NO: 1775, or an amino acid sequence at least 85% (e.g., at least 90%, 92%, 95%, 96%, 97%, 98%, or 99%) identical thereto; a linker comprising the amino acid sequence of SEQ ID NO: 1845, or an amino acid sequence having at least one, two, or three but no more than four modifications, e.g., substitutions, relative to SEQ ID NO: 1845; and an enhancement element comprising the amino acid sequence of SEQ ID NO: 1796, or an amino acid sequence at least 85% (e.g., at least 90%, 92%, 95%, 96%, 97%, 98%, or 99%) identical thereto;

[0156] (xi) a signal sequence comprising the amino acid sequence of SEQ ID NO: 1853, or an amino acid sequence at least 85% (e.g., at least 90%, 92%, 95%, 96%, 97%, 98%, or 99%) identical thereto; an enhancement element comprising the amino acid sequence of SEQ ID NO: 1794, or an amino acid sequence having at least one, two, or three but no more than four modifications, e.g., substitutions, relative to SEQ ID NO: 1794; a linker comprising the amino acid sequence of SEQ ID NO: 1845, or an amino acid sequence having at least one, two, or three but no more than four modifications, e.g., substitutions, relative to SEQ ID NO: 1845; and a GBA protein comprising the amino acid sequence of SEQ ID NO: 1775, or an amino acid sequence at least 85% (e.g., at least 90%, 92%, 95%, 96%, 97%, 98%, or 99%) identical thereto;

[0157] (xii) a signal sequence comprising the amino acid sequence of SEQ ID NO: 1853, or an amino acid sequence at least 85% (e.g., at least 90%, 92%, 95%, 96%, 97%, 98%, or 99%) identical thereto; a GBA protein comprising the amino acid sequence of SEQ ID NO: 1775, or an amino acid sequence at least 85% (e.g., at least 90%, 92%, 95%, 96%, 97%, 98%, or 99%) identical thereto; and an enhancement element comprising the amino acid sequence of SEQ ID NO: 1808, or an amino acid sequence having at least one, two, or three but no more than four modifications, e.g., substitutions, relative to SEQ ID NO: 1808;

[0158] (xiii) a first signal sequence comprising the amino acid sequence of SEQ ID NO: 1853, or an amino acid sequence at least 85% (e.g., at least 90%, 92%, 95%, 96%, 97%, 98%, or 99%) identical thereto; a first enhancement element comprising the amino acid sequence of SEQ ID NO: 1802, or an amino acid sequence at least 85% (e.g., at least 90%, 92%, 95%, 96%, 97%, 98%, or 99%) identical thereto; a GBA protein comprising the amino acid sequence of SEQ ID NO: 1775, or an amino acid sequence at least 85% (e.g., at least 90%, 92%, 95%, 96%, 97%, 98%, or 99%) identical thereto; a furin cleavage site comprising the amino acid sequence of SEQ ID NO: 1854, or an amino acid sequence having at least one, two, or three but no more than four modifications, e.g., substitutions, relative to SEQ ID NO: 1854; a T2A polypeptide comprising the amino acid sequence of SEQ ID NO: 1855, or an amino acid sequence having at least one, two, or three but no more than four modifications, e.g., substitutions, relative to SEQ ID NO: 1855; a second signal sequence comprising the nucleotide sequence of SEQ ID NO: 1857, or an amino acid sequence having at least one, two, or three but no more than four modifications, e.g., substitutions, relative to SEQ ID NO: 1857; and a second enhancement element comprising the amino acid sequence of SEQ ID NO: 1789, or an amino acid sequence at least 85% (e.g., at least 90%, 92%, 95%, 96%, 97%, 98%, or 99%) identical thereto;

[0159] (xiv) a first signal sequence comprising the amino acid sequence of SEQ ID NO: 1853, or an amino acid sequence at least 85% (e.g., at least 90%, 92%, 95%, 96%, 97%, 98%, or 99%) identical thereto; a GBA protein comprising the amino acid sequence of SEQ ID NO: 1775, or an amino acid sequence at least 85% (e.g., at least 90%, 92%, 95%, 96%, 97%, 98%, or 99%) identical thereto; a linker comprising the amino acid sequence of SEQ ID NO: 1845, or an amino acid sequence having at least one, two, or three but no more than four modifications, e.g., substitutions, relative to SEQ ID NO: 1845; a first enhancement element comprising the amino acid sequence of SEQ ID NO: 1798, or an amino acid sequence having at least one, two, or three but no more than four modifications, e.g., substitutions, relative to SEQ ID NO: 1798; a furin cleavage site comprising the amino acid sequence of SEQ ID NO: 1854, or an amino acid sequence having at least one, two, or three but no more than four modifications, e.g., substitutions, relative to SEQ ID NO: 1854; a T2A polypeptide comprising the amino acid sequence of SEQ ID NO: 1855, or an amino acid sequence having at least one, two, or three but no more than four modifications, e.g., substitutions, relative to SEQ ID NO: 1855; a second signal sequence comprising the nucleotide sequence of SEQ ID NO: 1857, or an amino acid sequence having at least one, two, or three but no more than four modifications, e.g., substitutions, relative to SEQ ID NO: 1857; and an enhancement element comprising the amino acid sequence of SEQ ID NO: 1789, or an amino sequence at least 85% (e.g., at least 90%, 92%, 95%, 96%, 97%, 98%, or 99%) identical thereto; or

[0160] (xv) a first signal sequence comprising the amino acid sequence of SEQ ID NO: 1853, or an amino acid sequence at least 85% (e.g., at least 90%, 92%, 95%, 96%, 97%, 98%, or 99%) identical thereto; a first enhancement element comprising the amino acid sequence of SEQ ID NO: 1802, or an amino acid sequence at least 85% (e.g., at least 90%, 92%, 95%, 96%, 97%, 98%, or 99%) identical thereto; a GBA protein comprising the amino acid sequence of SEQ ID NO: 1775, or an amino acid sequence at least 85% (e.g., at least 90%, 92%, 95%, 96%, 97%, 98%, or 99%) identical thereto; a linker comprising the amino acid sequence of SEQ ID NO: 1845, or an amino acid sequence having at least one, two, or three but no more than four modifications, e.g., substitutions, relative to SEQ ID NO: 1845; a first enhancement element comprising the amino acid sequence of SEQ ID NO: 1798, or an amino acid sequence having at least one, two, or three but no more than four modifications, e.g., substitutions, relative to SEQ ID NO: 1798; a furin cleavage site comprising the amino acid sequence of SEQ ID NO: 1854, or an amino acid sequence having at least one, two, or three but no more than four modifications, e.g., substitutions, relative to SEQ ID NO: 1854; a T2A polypeptide comprising the amino acid sequence of SEQ ID NO: 1855, or an amino acid sequence having at least one, two, or three but no more than four modifications, e.g., substitutions, relative to SEQ ID NO: 1855; a second signal sequence comprising the nucleotide sequence of SEQ ID NO: 1857, or an amino acid sequence having at least one, two, or three but no more than four modifications, e.g., substitutions, relative to SEQ ID NO: 1857; and an enhancement element comprising the amino acid sequence of SEQ ID NO: 1789, or an amino acid sequence at least 85% (e.g., at least 90%, 92%, 95%, 96%, 97%, 98%, or 99%) identical thereto.

[0161] 50. An isolated, e.g., recombinant viral genome comprising a promoter operably linked to the nucleic acid of any one of embodiments 1-6 or 9-49.

[0162] 51. The viral genome of any one of embodiments 7-49, further comprising a promoter operably linked to the nucleic acid comprising the transgene encoding the GBA protein.

[0163] 52. The viral genome of any one of embodiments 7-50, which further comprises an enhancer.

[0164] 53. The viral genome of embodiment 52, wherein the enhancer comprises a CMVie enhancer.

[0165] 54. The viral genome of embodiment 52 or 53, wherein the enhancer comprises the nucleotide sequence of SEQ ID NO: 1831, or a nucleotide sequence at least 95% identical thereto.

[0166] 55. The viral genome of any one of embodiments 50-54, wherein the promoter comprises a tissue specific promoter or a ubiquitous promoter.

[0167] 56. The viral genome of any one of embodiments 50-55, wherein the promoter comprises:

[0168] (i) an EF-1a promoter, a chicken β-actin (CBA) promoter and/or its derivative CAG, a CMV immediate-early enhancer and/or promoter, a β glucuronidase (GUSB) promoter, a ubiquitin C (UBC) promoter, a neuron-specific enolase (NSE), a platelet-derived growth factor (PDGF) promoter, a platelet-derived growth factor B-chain (PDGF-β) promoter, an intercellular adhesion molecule 2 (ICAM-2) promoter, a synapsin (Syn) promoter, a methyl-CpG binding protein 2 (MeCP2) promoter, a Ca2+/calmodulin-dependent protein kinase II (CaMKII) promoter, a metabotropic glutamate receptor 2 (mGluR2) promoter, a neurofilament light (NFL) or heavy (NFH) promoter, a β-globin minigene nβ2 promoter, a preproenkephalin (PPE) promoter, an enkephalin (Enk) and excitatory amino acid transporter 2 (EAAT2), a glial fibrillary acidic protein (GFAP) promoter, a myelin basic protein (MBP) promoter, a cardiovascular promoter (e.g., αMHC, cTnT, and CMV-MLC2k), a liver promoter (e.g., hAAT, TBG), a skeletal muscle promoter (e.g., desmin, MCK, C512) or a fragment, e.g., a truncation, or a functional variant thereof; and/or

[0169] (ii) the nucleotide sequence of any of SEQ ID NOs: 1832, 1833, 1834, 1835, 1836, 1839, 1840, or a nucleotide sequence at least 95% identical thereto.

[0170] 57. The viral genome of any one of embodiments 50-56, wherein the promoter comprises a CB promoter or functional variant thereof.

[0171] 58. The viral genome of embodiment 57, wherein the CB promoter or functional variant thereof comprises the nucleotide sequence of SEQ ID NO: 1834, or a nucleotide sequence at least 95% identical thereto.

[0172] 59. The viral genome of any one of embodiments 50-58, wherein the promoter comprises a CMVie enhancer and a CB promoter.

[0173] 60. The viral genome of embodiment 59, wherein the CMVie enhancer comprises the nucleotide sequence of SEQ ID NO: 1831, or a nucleotide sequence at least 95% identical thereto, and the CB promoter comprises the nucleotide sequence of SEQ ID NO: 1834, or a nucleotide sequence at least 95% identical thereto.

[0174] 61. The viral genome of any one of embodiments 50-61, wherein the promoter comprises an EF-1α promoter or functional variant thereof.

[0175] 62. The viral genome of embodiment 61, wherein the EF-1α promoter or functional variant thereof comprises the nucleotide sequence of SEQ ID NO: 1839 or 1840, or a nucleotide sequence at least 95% identical thereto.

[0176] 63. The viral genome of embodiment 61 or 62, wherein the EF-1α promoter or functional variant thereof comprises an intron, e.g., an intron comprising the nucleotide sequence of positions 242-1,180 of SEQ ID NO: 1839 or an intron comprising the nucleotide sequence of SEQ ID NO: 1841, or a nucleotide sequence at least 95% identical thereto.

[0177] 64. The viral genome of any one of embodiments 61-63, wherein the EF-1α promoter or functional variant thereof does not comprise an intron, e.g., an intron comprising the nucleotide sequence of positions 242-1,180 of SEQ ID NO: 1839 or an intron comprising the nucleotide sequence of SEQ ID NO: 1841, or a nucleotide sequence at least 95% identical thereto.

[0178] 65. The viral genome of any one of embodiments 50-64, wherein the promoter comprises a CBA promoter or functional variant thereof.

[0179] 66. The viral genome of embodiment 65, wherein the CBA promoter functional variant thereof comprises the nucleotide sequence of SEQ ID NO: 1836, or a nucleotide sequence at least 95% identical thereto.

[0180] 67. The viral genome of any one of embodiments 50-66, wherein the promoter comprises a CMVie enhancer, a CBA promoter or functional variant thereof, and an intron.

[0181] 68. The viral genome of embodiment 67, wherein:

[0182] (i) the CMVie enhancer comprises the nucleotide sequence of SEQ ID NO: 1831, or a nucleotide sequence at least 95% identical thereto;

[0183] (ii) the CBA promoter or functional variant thereof comprises the nucleotide sequence of SEQ ID NO: 1836, or a nucleotide sequence at least 95% identical thereto; and

[0184] (iii) the intron comprises the nucleotide sequence of SEQ ID NO: 1837, or a nucleotide sequence at least 95% identical thereto.

[0185] 69. The viral genome of any one of embodiments 50-68, wherein the promoter comprises a CAG promoter region.

[0186] 70. The viral genome of any one of embodiments 50-69, wherein the promoter comprises a CAG promoter region comprises:

[0187] (i) a CMVie enhancer, a CBA promoter or functional variant thereof, and an intron; and/or

[0188] (ii) the nucleotide sequence of SEQ ID NO: 1835, or a nucleotide sequence at least 95% identical thereto.

[0189] 71. The viral genome of any one of embodiments 50-70, wherein the promoter comprises a CMV promoter or functional variant thereof.

[0190] 72. The viral genome of embodiment 71, wherein the CMV promoter or functional variant thereof comprises the nucleotide sequence of SEQ ID NO: 1832, or a nucleotide sequence at least 95% identical thereto.

[0191] 73. The viral genome of any one of embodiments 50-72, wherein the promoter comprises a CMVie enhancer and a CMV promoter or functional variant thereof, optionally wherein the CMVie enhancer comprises the nucleotide sequence of SEQ ID NO: 1831, or a nucleotide sequence at least 95% identical thereto, and the CMV promoter or functional variant thereof comprises the nucleotide sequence of SEQ ID NO: 1832, or a nucleotide sequence at least 95% identical thereto.

[0192] 74. The viral genome of any one of embodiments 50-73, wherein the promoter comprises a CMV promoter region.

[0193] 75. The viral genome of embodiment 74, wherein the CMV promoter region comprises:

[0194] (i) a CMVie enhancer and a CMV promoter or functional variant thereof;

[0195] (ii) the nucleotide sequence of SEQ ID NO: 1833, or a nucleotide sequence at least 95% identical thereto.

[0196] 76. The viral genome of any one of embodiments 7-76, which further comprises an inverted terminal repeat (ITR) sequence.

[0197] 77. The viral genome of embodiment 76, wherein the ITR sequence is positioned 5′ relative to the nucleic acid comprising the transgene encoding the GBA protein.

[0198] 78. The viral genome of embodiment 75 or 76, wherein the ITR sequence is positioned 3′ relative to the nucleic acid comprising the transgene encoding the GBA protein.

[0199] 79. The viral genome of any one of embodiments 7-78, which comprises an ITR positioned 5′ relative to the nucleic acid comprising the transgene encoding the GBA protein and an ITR positioned 3′ relative to the nucleic acid comprising the transgene encoding the GBA protein.

[0200] 80. The viral genome of any one of embodiments 76-79, wherein the ITR comprises a nucleic acid sequence of SEQ ID NO: 1829, 1830, or 1862, or a nucleotide sequence at least 95% identical thereto.

[0201] 81. The viral genome of any one of embodiments 76-80, wherein the ITR comprises the nucleotide sequence of SEQ ID NO: 1860 and/or 1861, or a nucleotide sequence having at least one, two, or three modifications, but no more than four modifications of SEQ ID NO: 1860 and/or 1861.

[0202] 82. The viral genome of any one of embodiments 76-81, wherein the ITR is positioned 5′ relative to the nucleic acid comprising the transgene encoding the GBA protein and comprises the nucleotide sequence of SEQ ID NO: 1860 and/or 1861, or a nucleotide sequence having at least one, two, or three modifications, but no more than four modifications of SEQ ID NO: 1860 or 1861.

[0203] 83. The viral genome of any one of embodiments 76-81, wherein the ITR is positioned 3′ relative to the nucleic acid comprising the transgene encoding the GBA protein and comprises the nucleotide sequence of SEQ ID NO: 1860 or 1861, or a nucleotide sequence having at least one, two, or three modifications, but no more than four modifications of SEQ ID NO: 1860 and/or 1861.

[0204] 84. The viral genome of any one of embodiments 76-83, wherein:

[0205] (i) the ITR positioned 5′ relative to the nucleic acid comprising the transgene encoding the GBA protein comprises the nucleotide sequence of SEQ ID NO: 1829, or a nucleotide sequence at least 95% identical thereto; and/or

[0206] (ii) the ITR positioned 3′ relative to the nucleic acid comprising the transgene encoding the GBA protein comprises the nucleotide sequence of SEQ ID NO: 1830, or a nucleotide sequence at least 95% identical thereto.

[0207] 85. The viral genome of any one of embodiments 7-84, which further comprises a polyadenylation (polyA) signal region.

[0208] 86. The viral genome of embodiment 85, wherein the polyA signal region comprises the nucleotide sequence of SEQ ID NO: 1846, or a nucleotide sequence at least 95% identical thereto.

[0209] 87. The viral genome of any one of embodiments 7-86, which further comprises an intron region.

[0210] 88. The viral genome of embodiment 87, wherein the intron comprises a beta-globin intron.

[0211] 89. The viral genome of embodiment 87 or 88, wherein the intron comprises the nucleotide sequence of SEQ ID NO: 1842, or a nucleotide sequence at least 95% identical thereto.

[0212] 90. The viral genome of any one of embodiments 7-89, which further comprises an exon region, e.g., at least one, two, or three exon regions.

[0213] 91. The viral genome of any one of embodiments 7-90, which further comprises a Kozak sequence.

[0214] 92. The viral genome of any one of embodiments 50-91, which further comprises a nucleotide sequence encoding a miR binding site, e.g., a miR binding site that modulates, e.g., reduces, expression of the GBA protein encoded by the viral genome in a cell or tissue where the corresponding miRNA is expressed.

[0215] 93. The viral genome of embodiment 7-92, wherein the encoded miRNA binding site is complementary, e.g., fully complementary or partially complementary, to a miRNA expressed in a cell or tissue of the DRG, liver, hematopoietic, or a combination thereof.

[0216] 94. The viral genome of any one of embodiments 50-93, wherein the encoded miR binding site modulates, e.g., reduces, expression of the encoded GBA protein in a cell or tissue of the DRG, liver, hematopoietic lineage, or a combination thereof.

[0217] 95. The viral genome of any one of embodiments 7-94, which comprises at least 1-5 copies of the encoded miR binding site, e.g., at least 1, 2, 3, 4, or 5 copies.

[0218] 96. The viral genome of any one of embodiments 7-95, which comprises at least 4 copies of an encoded miR binding sites, optionally wherein all four copies comprise the same miR binding site, or at least one, two, three, or all of the copies comprise a different miR binding site.

[0219] 97. The viral genome of embodiment 96, wherein the 4 copies of the encoded miR binding sites are continuous (e.g., not separated by a spacer), or are separated by a spacer.

[0220] 98. The viral genome of embodiment 97, wherein the spacer comprises the nucleotide sequence of SEQ ID NO: 1848, or a nucleotide sequence having at least one, two, or three modifications, but no more than four modifications of SEQ ID NO: 1848.

[0221] 99. The viral genome of any one of embodiments 7-98, wherein the encoded miR binding site comprises a miR183 binding site, a miR122 binding site, a miR-142-3p, or a combination thereof, optionally wherein:

[0222] (i) the encoded miR183 binding site comprises the nucleotide sequence of SEQ ID NO: 1847, or a nucleotide sequence substantially identical (e.g., having at least 70%, 75%, 80%, 85%, 90%, 92%, 95%, 97%, 98%, or 99% sequence identity) thereto; or a nucleotide sequence having at least one, two, three, four, five, six, or seven modifications, but no more than ten modifications of SEQ ID NO: 1847;

[0223] (ii) the encoded miR122 binding site comprises the nucleotide sequence of SEQ ID NO: 1865, or a nucleotide sequence substantially identical (e.g., having at least 70%, 75%, 80%, 85%, 90%, 92%, 95%, 97%, 98%, or 99% sequence identity) thereto; or a nucleotide sequence having at least one, two, three, four, five, six, or seven modifications, but no more than ten modifications of SEQ ID NO: 1865; and/or

[0224] (iii) the encoded miR-142-3p binding site comprises the nucleotide sequence of SEQ ID NO: 1869, or a nucleotide sequence substantially identical (e.g., having at least 70%, 75%, 80%, 85%, 90%, 92%, 95%, 97%, 98%, or 99% sequence identity) thereto; or a nucleotide sequence having at least one, two, three, four, five, six, or seven modifications, but no more than ten modifications of SEQ ID NO: 1869.

[0225] 100. The viral genome of any one of embodiments 7-99, wherein the viral genome comprises an encoded miR183 binding site.

[0226] 101. The viral genome of any one of embodiments 7-100, wherein the viral genome comprises at least 1-5 copies, e.g., 4 copies of a miR183 binding site, optionally wherein each copy is continuous (e.g., not separated by a spacer), or each copy is separated by a spacer.

[0227] 102. The viral genome of embodiment 100 or 101, wherein the encoded miR183 binding site comprises the nucleotide sequence of SEQ ID NO: 1847, or a nucleotide sequence substantially identical (e.g., having at least 70%, 75%, 80%, 85%, 90%, 92%, 95%, 97%, 98%, or 99% sequence identity) thereto; or a nucleotide sequence having at least one, two, three, four, five, six, or seven modifications, but no more than ten modifications of SEQ ID NO: 1847.

[0228] 103. The viral genome of any one of embodiments 7-102, wherein the viral genome comprises:

[0229] (i) a first encoded miR183 binding site comprising the nucleotide sequence of SEQ ID NO: 1847, or a nucleotide sequence substantially identical (e.g., having at least 70%, 75%, 80%, 85%, 90%, 92%, 95%, 97%, 98%, or 99% sequence identity) thereto; or a nucleotide sequence having at least one, two, three, four, five, six, or seven modifications, but no more than ten modifications of SEQ ID NO: 1847;

[0230] (ii) a first spacer sequence comprising the nucleotide sequence of SEQ ID NO: 1848, or a nucleotide sequence having at least one, two, or three modifications, but no more than four modifications of SEQ ID NO: 1848;

[0231] (iii) a second encoded miR183 binding site comprising the nucleotide sequence of SEQ ID NO: 1847, or a nucleotide sequence substantially identical (e.g., having at least 70%, 75%, 80%, 85%, 90%, 92%, 95%, 97%, 98%, or 99% sequence identity) thereto; or a nucleotide sequence having at least one, two, three, four, five, six, or seven modifications, but no more than ten modifications of SEQ ID NO: 1847;

[0232] (iv) a second spacer sequence comprising the nucleotide sequence of SEQ ID NO: 1848, or a nucleotide sequence having at least one, two, or three modifications, but no more than four modifications of SEQ ID NO: 1848;

[0233] (v) a third encoded miR183 binding site comprising the nucleotide sequence of SEQ ID NO: 1847, or a nucleotide sequence substantially identical (e.g., having at least 70%, 75%, 80%, 85%, 90%, 92%, 95%, 97%, 98%, or 99% sequence identity) thereto; or a nucleotide sequence having at least one, two, three, four, five, six, or seven modifications, but no more than ten modifications of SEQ ID NO: 1847;

[0234] (vi) a third spacer sequence comprising the nucleotide sequence of SEQ ID NO: 1848, or a nucleotide sequence having at least one, two, or three modifications, but no more than four modifications of SEQ ID NO: 1848; and

[0235] (vii) a fourth encoded miR183 binding site comprising the nucleotide sequence of SEQ ID NO: 1847, or a nucleotide sequence substantially identical (e.g., having at least 70%, 75%, 80%, 85%, 90%, 92%, 95%, 97%, 98%, or 99% sequence identity) thereto; or a nucleotide sequence having at least one, two, three, four, five, six, or seven modifications, but no more than ten modifications of SEQ ID NO: 1847.

[0236] 104. The viral genome of any one of embodiments 7-103, which comprises a miR183 binding site series, which comprises four copies of a miR183 binding site, wherein each copy of the miR binding site in the series is separated by a spacer.

[0237] 105. The viral genome of embodiment 104, wherein the encoded miR183 binding site series comprises the nucleotide sequence of SEQ ID NO: 1849, or a nucleotide sequence at least 95% identical thereto.

[0238] 106. The viral genome of any one of embodiments 7-105, which is self-complementary.

[0239] 107. The viral genome of any one of embodiments 7-106, which is single-stranded.

[0240] 108. An isolated, e.g., recombinant, viral genome comprising in 5′ to 3′ order:

[0241] (i) a 5′ adeno-associated (AAV) ITR, optionally wherein the 5′ AAV ITR comprises the nucleotide sequence of SEQ ID NO: 1829, or a nucleotide sequence at least 95% identical thereto;

[0242] (ii) a CMVie enhancer, optionally wherein the CMVie enhancer comprises the nucleotide sequence of SEQ ID NO: 1831, or a nucleotide sequence at least 95% identical thereto;

[0243] (iii) a CB promoter or functional variant thereof, optionally wherein the CB promoter or functional variant thereof comprises the nucleotide sequence of SEQ ID NO: 1834, or a nucleotide sequence at least 95% identical thereto;

[0244] (iv) an intron, optionally wherein the intron comprises the nucleotide sequence of SEQ ID NO: 1842, or a nucleotide sequence at least 95% identical thereto;

[0245] (v) a nucleotide sequence encoding a signal sequence, optionally wherein the nucleotide sequence encoding the signal sequence comprises the nucleotide sequence of SEQ ID NO: 1850, or a nucleotide sequence at least 95% identical thereto;

[0246] (vi) a transgene encoding a GBA protein, wherein the nucleotide sequence encoding the GBA protein comprises the nucleotide sequence of SEQ ID NO: 1773 or a nucleotide sequence at least 88% (e.g., at least 89, 90, 92, 95, 96, 97, 98, or 99%) identical to the nucleotide sequence of SEQ ID NO: 1773;

[0247] (vii) a polyA signal region, optionally wherein the polyA signal region comprises the nucleotide sequence of SEQ ID NO: 1846, or a nucleotide sequence at least 95% identical thereto; and

[0248] (viii) a 3′ AAV ITR, optionally wherein the 3′ AAV ITR comprises the nucleotide sequence of SEQ ID NO: 1830, or a nucleotide sequence at least 95% identical thereto.

[0249] 109. An isolated, e.g., recombinant, viral genome comprising in 5′ to 3′ order:

[0250] (i) a 5′ adeno-associated (AAV) ITR, optionally wherein the 5′ AAV ITR comprises the nucleotide sequence of SEQ ID NO: 1829, or a nucleotide sequence at least 95% identical thereto;

[0251] (ii) a CMVie enhancer, optionally wherein the CMVie enhancer comprises the nucleotide sequence of SEQ ID NO: 1831, or a nucleotide sequence at least 95% identical thereto;

[0252] (iii) a CB promoter or functional variant thereof, optionally wherein the CB promoter or functional variant thereof comprises the nucleotide sequence of SEQ ID NO: 1834, or a nucleotide sequence at least 95% identical thereto;

[0253] (iv) an intron, optionally wherein the intron comprises the nucleotide sequence of SEQ ID NO: 1842, or a nucleotide sequence at least 95% identical thereto;

[0254] (v) a nucleotide sequence encoding a signal sequence, optionally wherein the nucleotide sequence encoding the signal sequence comprises the nucleotide sequence of SEQ ID NO: 1850, or a nucleotide sequence at least 95% identical thereto;

[0255] (vi) a transgene encoding a GBA protein, optionally wherein the nucleotide sequence encoding the GBA protein comprises the nucleotide sequence of SEQ ID NO: 1773 or a nucleotide sequence at least 88% (e.g., at least 89, 90, 92, 95, 96, 97, 98, or 99%) identical to the nucleotide sequence of SEQ ID NO: 1773;

[0256] (vii) an encoded miR183 binding site, optionally wherein the encoded miR183 binding site comprises the nucleotide sequence of SEQ ID NO: 1847, or a nucleotide sequence having at least one, two, three, four, five, six, or seven modifications, but no more than ten modifications of SEQ ID NO: 1847;

[0257] (viii) a spacer sequence, optionally wherein the spacer comprises the nucleotide sequence of SEQ ID NO: 1848, or a nucleotide sequence having at least one, two, or three modifications, but no more than four modifications of SEQ ID NO: 1848;

[0258] (ix) an encoded miR183 binding site, optionally wherein the encoded miR183 binding site comprises the nucleotide sequence of SEQ ID NO: 1847, or a nucleotide sequence having at least one, two, three, four, five, six, or seven modifications, but no more than ten modifications of SEQ ID NO: 1847;

[0259] (x) a spacer sequence, optionally wherein the spacer comprises the nucleotide sequence of SEQ ID NO: 1848, or a nucleotide sequence having at least one, two, or three modifications, but no more than four modifications of SEQ ID NO: 1848;

[0260] (xi) an encoded miR183 binding site, optionally wherein the encoded miR183 binding site comprises the nucleotide sequence of SEQ ID NO: 1847, or a nucleotide sequence having at least one, two, three, four, five, six, or seven modifications, but no more than ten modifications of SEQ ID NO: 1847;

[0261] (xii) a spacer sequence, optionally wherein the spacer comprises the nucleotide sequence of SEQ ID NO: 1848, or a nucleotide sequence having at least one, two, or three modifications, but no more than four modifications of SEQ ID NO: 1848;

[0262] (xiii) an encoded miR183 binding site, optionally wherein the encoded miR183 binding site comprises the nucleotide sequence of SEQ ID NO: 1847, or a nucleotide sequence having at least one, two, three, four, five, six, or seven modifications, but no more than ten modifications of SEQ ID NO: 1847;

[0263] (xiv) a polyA signal region, optionally wherein the polyA signal region comprises the nucleotide sequence of SEQ ID NO: 1846, or a nucleotide sequence at least 95% identical thereto; and

[0264] (xv) a 3′ AAV ITR, optionally wherein the 3′ AAV ITR comprises the nucleotide sequence of SEQ ID NO: 1830, or a nucleotide sequence at least 95% identical thereto.

[0265] 110. The viral genome of any one of embodiments 50-109, which comprises the nucleotide sequence of SEQ ID NO: 1812, or a nucleotide sequence at least 95% identical thereto.

[0266] 111. The viral genome of any one of embodiments 50-110, which comprises the nucleotide sequence of SEQ ID NO: 1826, or a nucleotide sequence at least 95% identical thereto.

[0267] 112. An isolated, e.g., recombinant, viral genome comprising in 5′ to 3′ order:

[0268] (i) a 5′ adeno-associated (AAV) ITR, optionally wherein the 5′ AAV ITR comprises the nucleotide sequence of SEQ ID NO: 1829, or a nucleotide sequence at least 95% identical thereto;

[0269] (ii) a CMVie enhancer, optionally wherein the CMVie enhancer comprises the nucleotide sequence of SEQ ID NO: 1831, or a nucleotide sequence at least 95% identical thereto;

[0270] (iii) a CB promoter or functional variant thereof, optionally wherein the CB promoter or functional variant thereof comprises the nucleotide sequence of SEQ ID NO: 1834, or a nucleotide sequence at least 95% identical thereto;

[0271] (iv) an intron, optionally wherein the intron comprises the nucleotide sequence of SEQ ID NO: 1842, or a nucleotide sequence at least 95% identical thereto;

[0272] (v) a nucleic acid comprising a transgene encoding a β-glucocerebrosidase (GBA) protein of any one of embodiments 1-6 or 9-49;

[0273] (vi) a polyA signal region, optionally wherein the polyA signal region comprises the nucleotide sequence of SEQ ID NO: 1846, or a nucleotide sequence at least 95% identical thereto; and

[0274] (vii) a 3′ AAV ITR, optionally wherein the 3′ AAV ITR comprises the nucleotide sequence of SEQ ID NO: 1830, or a nucleotide sequence at least 95% identical thereto.

[0275] 113. An isolated, e.g., recombinant, viral genome comprising in 5′ to 3′ order:

[0276] (i) a 5′ adeno-associated (AAV) ITR, optionally wherein the 5′ AAV ITR comprises the nucleotide sequence of SEQ ID NO: 1829, or a nucleotide sequence at least 95% identical thereto;

[0277] (ii) an EF-1α promoter or functional variant thereof, optionally wherein the EF-1α promoter or functional variant thereof comprises the nucleotide sequence of SEQ ID NO: 1839 or 1840, or a nucleotide sequence at least 95% identical thereto;

[0278] (iii) a nucleic acid comprising a transgene encoding a β-glucocerebrosidase (GBA) protein of any one of embodiments 1-6 or 9-49;

[0279] (iv) a polyA signal region, optionally wherein the polyA signal region comprises the nucleotide sequence of SEQ ID NO: 1846, or a nucleotide sequence at least 95% identical thereto; and

[0280] (v) a 3′ AAV ITR, optionally wherein the 3′ AAV ITR comprises the nucleotide sequence of SEQ ID NO: 1830, or a nucleotide sequence at least 95% identical thereto.

[0281] 114. An isolated, e.g., recombinant, viral genome comprising in 5′ to 3′ order:

[0282] (i) a 5′ adeno-associated (AAV) ITR, optionally wherein the 5′ AAV ITR comprises the nucleotide sequence of SEQ ID NO: 1829, or a nucleotide sequence at least 95% identical thereto;

[0283] (ii) a CMVie enhancer, optionally wherein the CMVie enhancer comprises the nucleotide sequence of SEQ ID NO: 1831, or a nucleotide sequence at least 95% identical thereto;

[0284] (iii) a CMV promoter or functional variant thereof, optionally wherein the CMV promoter or functional variant thereof comprises the nucleotide sequence of SEQ ID NO: 1832, or a nucleotide sequence at least 95% identical thereto;

[0285] (iv) an intron, optionally wherein the intron comprises the nucleotide sequence of SEQ ID NO: 1842, or a nucleotide sequence at least 95% identical thereto;

[0286] (v) a nucleic acid comprising a transgene encoding a β-glucocerebrosidase (GBA) protein of any one of embodiments 1-6 or 9-49;

[0287] (vi) a polyA signal region, optionally wherein the polyA signal region comprises the nucleotide sequence of SEQ ID NO: 1846, or a nucleotide sequence at least 95% identical thereto; and

[0288] (vii) a 3′ AAV ITR, optionally wherein the 3′ AAV ITR comprises the nucleotide sequence of SEQ ID NO: 1830, or a nucleotide sequence at least 95% identical thereto.

[0289] 115. An isolated, e.g., recombinant, viral genome comprising in 5′ to 3′ order:

[0290] (i) a 5′ adeno-associated (AAV) ITR, optionally wherein the 5′ AAV ITR comprises the nucleotide sequence of SEQ ID NO: 1829, or a nucleotide sequence at least 95% identical thereto;

[0291] (ii) an CAG promoter or functional variant thereof, optionally wherein the CAG promoter or functional variant thereof comprises the nucleotide sequence of SEQ ID NO: 1835, or a nucleotide sequence at least 95% identical thereto;

[0292] (iii) a nucleic acid comprising a transgene encoding a β-glucocerebrosidase (GBA) protein of any one of embodiments 1-6 or 9-49;

[0293] (iv) a polyA signal region, optionally wherein the polyA signal region comprises the nucleotide sequence of SEQ ID NO: 1846, or a nucleotide sequence at least 95% identical thereto; and

[0294] (v) a 3′ AAV ITR, optionally wherein the 3′ AAV ITR comprises the nucleotide sequence of SEQ ID NO: 1830, or a nucleotide sequence at least 95% identical thereto.

[0295] 116. The viral genome of any one of embodiments 7-107 or 112-115, which comprises the nucleotide sequence of any one of SEQ ID NOs: 1759-1771, 1809-1811, 1813-1827, or 1870, or a nucleotide sequence at least 95% identical thereto.

[0296] 117. The viral genome of any one of embodiments 7-116, which further comprises a nucleic acid encoding a capsid protein, e.g., a structural protein, wherein the capsid protein comprises a VP1 polypeptide, a VP2 polypeptide, and/or a VP3 polypeptide.

[0297] 118. The viral genome of embodiment 117, wherein the VP1 polypeptide, the VP2 polypeptide, and/or the VP3 polypeptide are encoded by at least one Cap gene.

[0298] 119. The viral genome of any one of embodiments 7-118, which further comprises a nucleic acid encoding a Rep protein, e.g., a non-structural protein, wherein the Rep protein comprises a Rep78 protein, a Rep68, Rep52 protein, and/or a Rep40 protein.

[0299] 120. The viral genome of embodiment 119, wherein the Rep78 protein, the Rep68 protein, the Rep52 protein, and/or the Rep40 protein are encoded by at least one Rep gene.

[0300] 121. An isolated, e.g., recombinant GBA protein encoded by the isolated nucleic acid of any one of embodiments 1-6 or 9-49, or the viral genome of any one of embodiments 7-120.

[0301] 122. An isolated, e.g., recombinant, AAV particle comprising:

[0302] (i) a capsid protein; and

[0303] (ii) the viral genome of any one of embodiments 7-120.

[0304] 123. The AAV particle of embodiment 122, wherein:

[0305] (i) the capsid protein comprises the amino acid sequence of SEQ ID NO: 138, or an amino acid sequence with at least 80% (e.g., at least about 85, 90, 95, 96, 97, 98, or 99%) sequence identity thereto;

[0306] (ii) the capsid protein comprises an amino acid sequence having at least one, two or three modifications but not more than 30, 20 or 10 modifications of the amino acid sequence of SEQ ID NO: 138;

[0307] (iii) the capsid protein comprises the amino acid sequence of SEQ ID NO: 11, or an amino acid sequence with at least 80% (e.g., at least about 85, 90, 95, 96, 97, 98, or 99%) sequence identity thereto;

[0308] (iv) the capsid protein comprises an amino acid sequence having at least one, two or three modifications but not more than 30, 20 or 10 modifications of the amino acid sequence of SEQ ID NO: 11;

[0309] (v) the capsid protein comprises an amino acid sequence encoded by the nucleotide sequence of SEQ ID NO: 137, or a sequence with at least 80% (e.g., at least about 85, 90, 95, 96, 97, 98, or 99%) sequence identity thereto; and/or

[0310] (vi) the nucleotide sequence encoding the capsid protein comprises the nucleotide sequence of SEQ ID NO: 137, or a sequence with at least 80% (e.g., at least about 85, 90, 95, 96, 97, 98, or 99%) sequence identity thereto.

[0311] 124. The AAV particle of embodiment 122 or 123, wherein the capsid protein comprises:

[0312] (i) an amino acid substitution at position K449, e.g., a K449R substitution, numbered according to SEQ ID NO:138;

[0313] (ii) an insert comprising the amino acid sequence of TLAVPFK (SEQ ID NO: 1262), optionally wherein the insert is present immediately subsequent to position 588, relative to a reference sequence numbered according to SEQ ID NO:138;

[0314] (iii) an amino acid other than “A” at position 587 and/or an amino acid other than “Q” at position 588, numbered according to SEQ ID NO: 138;

[0315] (iv) the amino acid substitution of A587D and/or Q588G, numbered according to SEQ ID NO:138.

[0316] 125. The AAV particle of any one of embodiments 122-124, wherein the capsid protein comprises (i) the amino acid substitution of K449R numbered according to SEQ ID NO:138; and (ii) an insert comprising the amino acid sequence of TLAVPFK (SEQ ID NO: 1262), optionally wherein the insert is present immediately subsequent to position 588 of SEQ ID NO:138.

[0317] 126. The AAV particle of any one of embodiments 122-124, wherein the capsid protein comprises (i) the amino acid substitution of K449R numbered according to SEQ ID NO:138; (ii) an insert comprising the amino acid sequence of TLAVPFK (SEQ ID NO: 1262), optionally wherein the insert is present immediately subsequent to position 588, relative to a reference sequence numbered according to SEQ ID NO:138; and (iii) the amino acid substitutions of A587D and Q588G, numbered according to SEQ ID NO:138.

[0318] 127. The AAV particle of any one of embodiments 122-124, wherein the capsid protein comprises (i) an insert comprising the amino acid sequence of TLAVPFK (SEQ ID NO: 1262), optionally wherein the insert is present immediately subsequent to position 588, relative to a reference sequence numbered according to SEQ ID NO:138; and (ii) the amino acid substitutions of A587D and Q588G, numbered according to SEQ ID NO:138.

[0319] 128. The AAV particle of any one of embodiments 122-127, wherein the capsid protein comprises any of the capsid proteins listed in Table 1 or a functional variant thereof.

[0320] 129. The AAV particle of any one of embodiments 122-128, wherein the capsid protein comprises a VOY101, VOY201, AAVPHP.N (PHP.N), AAVPHP.B (PHP.B), AAVPHP.A (PHP.A), PHP.B2, PHP.B3, G2B4, G2B5, AAV9, AAVrh10, or a functional variant thereof.

[0321] 130. The AAV particle of any one of embodiments 122-129, wherein:

[0322] (i) the capsid protein comprises the amino acid sequence of SEQ ID NO: 1, or an amino acid sequence substantially identical (e.g., having at least 70%, 75%, 80%, 85%, 90%, 92%, 95%, 97%, 98%, or 99% sequence identity) thereto;

[0323] (ii) the capsid protein comprises an amino acid sequence comprising at least one, two, or three modifications but no more than 30, 20, or 10 modifications, e.g., substitutions, relative to the amino acid sequence of SEQ ID NO: 1;

[0324] (iii) the capsid protein comprises an amino acid sequence encoded by the nucleotide sequence of SEQ ID NO: 2 or a nucleotide sequence substantially identical (e.g., having at least 70%, 75%, 80%, 85%, 90%, 92%, 95%, 97%, 98%, or 99% sequence identity) thereto; and/or

[0325] (iv) the nucleotide sequence encoding the capsid protein comprises the nucleotide sequence of SEQ ID NO: 2, or a nucleotide sequence substantially identical (e.g., having at least 70%, 75%, 80%, 85%, 90%, 92%, 95%, 97%, 98%, or 99% sequence identity) thereto.

[0326] 131. The AAV particle of any one of embodiments 122-130, wherein the capsid protein comprises:

[0327] (i) a VP1 polypeptide, VP2 polypeptide, VP3 polypeptide, or a combination thereof;

[0328] (ii) the amino acid sequence corresponding to positions 138-743, e.g., a VP2, of SEQ ID NO: 1, or a sequence with at least 80% (e.g., at least about 85, 90, 92, 95, 96, 97, 98, or 99%) sequence identity thereto;

[0329] (iii) the amino acid sequence corresponding to positions 203-743, e.g., a VP3, of SEQ ID NO: 1, or a sequence with at least 80% (e.g., at least about 85, 90, 92, 95, 96, 97, 98, or 99%) sequence identity thereto; and/or

[0330] (iv) the amino acid sequence corresponding to positions 1-743, e.g., a VP1, of SEQ ID NO: 1, or a sequence with at least 80% (e.g., at least about 85, 90, 92, 95, 96, 97, 98, or 99%) sequence identity thereto.

[0331] 132. The AAV particle of any one of embodiments 122-131, wherein the nucleotide sequence encoding the capsid protein comprises:

[0332] (i) a CTG initiation codon; and/or

[0333] (ii) the nucleotide sequence of SEQ ID NO: 137 which comprises 3-20 mutations, e.g., substitutions, e.g., 3-15 mutations, 3-10 mutations, 3-5 mutations, 5-20 mutations, 5-15 mutations, 5-10 mutations, 10-20 mutations, 10-15 mutations, 15-20 mutations, 3 mutations, 5 mutations, 10 mutations, 12 mutations, 15 mutations, 18 mutations, or 20 mutations.

[0334] 133. A vector comprising the isolated nucleic acid of any one of embodiments 1-6 or 9-49, or the viral genome of any one of embodiments 7-120.

[0335] 134. A cell comprising the viral genome of any one of embodiments 7-120, the viral particle of any one of embodiments 122-132, or the vector of embodiment 133.

[0336] 135. The cell of embodiment 134, which a mammalian cell, e.g., an HEK293 cell, an insect cell, e.g., an Sf9 cell, or a bacterial cell.

[0337] 136. A nucleic acid comprising the viral genome of any one of embodiments 7-120, and a backbone region suitable for replication of the viral genome in a cell, e.g., a bacterial cell (e.g., wherein the backbone region comprises one or both of a bacterial origin of replication and a selectable marker).

[0338] 137. The nucleic acid of embodiment 136, wherein the viral genome comprises a nucleotide sequence of any one of SEQ ID NOs: 1799-1082, 1752-1759, 1803-1821, or 1824-1830.

[0339] 138. A method of making a viral genome, the method comprising:

[0340] (i) providing the nucleic acid molecule comprising the viral genome embodiment 136 or 137, or a nucleic acid encoding the viral genome of any one of embodiments 7-120; and

[0341] (ii) excising the viral genome from the backbone region, e.g., by cleaving the nucleic acid molecule at upstream and downstream of the viral genome.

[0342] 139. A method of making an isolated, e.g., recombinant, AAV particle, the method comprising

[0343] (i) providing a host cell comprising the viral genome of any one of embodiments 7-120 or the nucleic acid encoding the viral genome of embodiment 136 or 137; and

[0344] (ii) incubating the host cell under conditions suitable to enclose the viral genome in a capsid protein, e.g., a VOY101 capsid protein;

[0345] thereby making the isolated AAV particle.

[0346] 140. The method of embodiment 139, further comprising, prior to step (i), introducing a first nucleic acid molecule comprising the viral genome into the host cell.

[0347] 141. The method of embodiment 139 or 140, wherein the host cell comprises a second nucleic acid encoding a capsid protein, e.g., a VOY101 capsid protein.

[0348] 142. The method of embodiment 141, further comprising introducing the second nucleic acid into the cell.

[0349] 143. The method of embodiment 141 or 142, wherein the second nucleic acid molecule is introduced into the host cell prior to, concurrently with, or after the first nucleic acid molecule.

[0350] 144. The method of any one of embodiments 139-143, wherein the host cell comprises a mammalian cell, e.g., an HEK293 cell, an insect cell, e.g., an Sf9 cell, or a bacterial cell.

[0351] 145. A pharmaceutical composition comprising the AAV particle of any one of embodiments 122-132, or an AAV particle comprising the viral genome of any one of embodiments 7-120, and a pharmaceutically acceptable excipient.

[0352] 146. A method of delivering an exogenous GBA protein to a subject, comprising administering an effective amount of the pharmaceutical composition of embodiment 145, the AAV particle of any one of embodiments 122-132, an AAV particle comprising the viral genome of any one of embodiments 7-120, or an AAV particle comprising a viral genome comprising the nucleic acid of any one of embodiments 1-6 or 9-49, thereby delivering the exogenous GBA to the subject.

[0353] 147. The method of embodiment 146, wherein the subject has, has been diagnosed with having, or is at risk of having a disease associated with expression of GBA, e.g., aberrant or reduced GBA expression, e.g., expression of an GBA gene, GBA mRNA, and/or GBA protein.

[0354] 148. The method of embodiment 146 or 147, wherein the subject has, has been diagnosed with having, or is at risk of having a neurodegenerative or neuromuscular disorder.

[0355] 149. A method of treating a subject having or diagnosed with having a disease associated with GBA expression comprising administering an effective amount of the pharmaceutical composition of embodiment 145, the AAV particle of any one of embodiments 122-132, an AAV particle comprising the viral genome of any one of embodiments 7-120, or an AAV particle comprising a viral genome comprising the nucleic acid of any one of embodiments 1-6 or 9-49, thereby treating the disease associated with GBA expression in the subject.

[0356] 150. A method of treating a subject having or diagnosed with having a neurodegenerative or neuromuscular disorder, comprising administering an effective amount of the pharmaceutical composition of embodiment 145, the AAV particle of any one of embodiments 122-132, an AAV particle comprising the viral genome of any one of embodiments 7-120, or an AAV particle comprising a viral genome comprising the nucleic acid of any one of embodiments 1-6 or 9-49, thereby treating the neurodegenerative or neuromuscular disorder in the subject.

[0357] 151. The method of any one of embodiments 147-150, wherein the disease associated with expression of GBA or the neurodegenerative or neuromuscular disorder comprises Parkinson's Disease (PD), dementia with Lewy Bodies (DLB), Gaucher disease (GD), Spinal muscular atrophy (SMA), Multiple System Atrophy (MSA), or Multiple sclerosis (MS).

[0358] 152. A method of treating a subject having or diagnosed with having Parkinson's Disease (PD) (e.g., PD associated with a mutation in a GBA gene) comprising administering an effective amount of the pharmaceutical composition of embodiment 145, the AAV particle of any one of embodiments 122-132, an AAV particle comprising the viral genome of any one of embodiments 7-120, or an AAV particle comprising a viral genome comprising the nucleic acid of any one of embodiments 1-6 or 9-49, thereby treating PD in the subject.

[0359] 153. The method of embodiment 151 or 152, wherein the PD is associated with a mutation in a GBA gene.

[0360] 154. The method of any one of embodiments 151-153, wherein the PD is an early onset PD (e.g., before 50 years of age) or a juvenile PD (e.g., before 20 years of age).

[0361] 155. The method of embodiment 151-154, wherein the PD is a tremor dominant, postural instability gait difficulty PD (PIGD) or a sporadic PD (e.g., a PD not associated with a mutation).

[0362] 156. A method of treating a subject having or diagnosed with having Gaucher Disease (GD) comprising administering an effective amount of the pharmaceutical composition of embodiment 145, the AAV particle of any one of embodiments 122-132, an AAV particle comprising the viral genome of any one of embodiments 7-120, or an AAV particle comprising a viral genome comprising the nucleic acid of any one of embodiments 1-6 or 9-49, thereby treating GD in the subject.

[0363] 157. The method of embodiment 151 or 156, wherein the GD is neuronopathic GD (e.g., affect a cell or tissue of the CNS, e.g., a cell or tissue of the brain and/or spinal cord), non-neuronopathic GD (e.g., does not affect a cell or tissue of the CNS), or combination thereof.

[0364] 158. The method of any one of embodiments 151 or 156-157, wherein the GD is Type I GD (GD1), Type 2 GD (GD2), or Type 3 GD (GD3).

[0365] 159. The method of embodiment 158, wherein the GD1 is non-neuronopathic GD.

[0366] 160. The method of embodiment 158, wherein the GD2 is a neuronopathic GD.

[0367] 161. The method of any one of embodiments 146-160, wherein the subject has a reduced level of GCase activity as compared to a reference level, when measured by an assay, e.g., an assay as described in Example 7.

[0368] 162. The method of embodiment 161, wherein the reference level comprises the level of GCase activity in a subject that does not have a disease associated with GBA expression, a neuromuscular and/or a neurodegenerative disorder.

[0369] 163. The method of any one of embodiments 149-162, wherein treating comprises prevention of progression of the disease in the subject.

[0370] 164. The method of any one of embodiments 149-163, wherein treating results in amelioration of at least one symptom of the disease associated with GBA expression, the neurodegenerative disorder, and/or the neuromuscular disorder in the subject.

[0371] 165. The method of embodiment 164, wherein the symptom of the disease associated with GBA expression, the neurodegenerative disorder, and/or the neuromuscular disorder comprises reduced GCase activity, accumulation of glucocerebroside and other glycolipids, e.g., within immune cells (e.g., macrophages), build-up of synuclein aggregates (e.g., Lewy bodies), developmental delay, progressive encephalopathy, progressive dementia, ataxia, myoclonus, oculomotor dysfunction, bulbar palsy, generalized weakness, trembling of a limb, depression, visual hallucinations, cognitive decline, or a combination thereof.

[0372] 166. The method of any one of embodiments 146-165, wherein the subject is a human.

[0373] 167. The method of any one of embodiments 146-166, wherein the subject is a juvenile, e.g., between 6 years of age to 20 years of age.

[0374] 168. The method of any one of embodiments 146-167, wherein the subject is an adult, e.g., above 20 years of age.

[0375] 169. The method of any one of embodiments 146-168, wherein the subject has a mutation in a GBA gene, GBA mRNA, and/or GBA protein.

[0376] 170. The method of any one of embodiments 146-169, wherein the AAV particle is administered to the subject intravenously, intracerebrally, via intrathalamic (ITH) administration, intramuscularly, intrathecally, intracerebroventricularly, via intraparenchymal administration, via focused ultrasound (FUS), e.g., coupled with the intravenous administration of microbubbles (FUS-MB), or MRI-guided FUS coupled with intravenous administration, or via intra-cisterna magna injection (ICM).

[0377] 171. The method of any one of embodiments 146-170, wherein the AAV particle is administered via dual ITH and ICM administration.

[0378] 172. The method of any one of embodiments 146-170, wherein the AAV particle is administered via intravenous injection, optionally wherein the intravenous injection is via focused ultrasound (FUS), e.g., coupled with the intravenous administration of microbubbles (FUS-MB), or MRI-guided FUS coupled with intravenous administration.

[0379] 173. The method of any one of embodiments 146-172, wherein the AAV particle is administered to a cell, tissue, or region of the CNS, e.g., a region of the brain or spinal cord, e.g., the parenchyma, the cortex, substantia nigra, caudate cerebellum, striatum, corpus callosum, cerebellum, brain stem caudate-putamen, thalamus, superior colliculus, the spinal cord, or a combination thereof.

[0380] 174. The method of any one of embodiments 146-173, wherein the AAV particle is administered to a cell, tissue, or region of the periphery, e.g., a lung cell or tissue, a heart cell or tissue, a spleen cell or tissue, a liver cell or tissue, or a combination thereof.

[0381] 175. The method of any one of embodiments 146-174, wherein the AAV particle is administered to the cerebral spinal fluid, the serum, or a combination thereof.

[0382] 176. The method of any one of embodiments 146-175, wherein the AAV particle is administered to at least two tissues, or regions of the CNS, e.g., bilateral administration.

[0383] 177. The method of any one of embodiments 146-176, further comprising performing a blood test, performing an imaging test, collecting a CNS biopsy sample, collecting a tissue biopsy, (e.g., a biopsy of the lung, liver, or spleen), collecting a blood or serum sample, or collecting an aqueous cerebral spinal fluid biopsy.

[0384] 178. The method of any one of embodiments 146-177, which further comprises evaluating, e.g., measuring, the level of GBA expression, e.g., GBA gene, GBA mRNA, and/or GBA protein expression, in the subject, e.g., in a cell, tissue, or fluid, of the subject, optionally wherein the level of GBA protein is measured by an assay described herein, e.g., an ELISA, a Western blot, or an immunohistochemistry assay.

[0385] 179. The method of embodiment 178, wherein measuring the level of GBA expression is performed prior to, during, or subsequent to treatment with the AAV particle.

[0386] 180. The method of embodiment 178 or 179, wherein the cell or tissue is a cell or tissue of the central nervous system (e.g., parenchyma) or a peripheral cell or tissue (e.g., the liver, heart, and/or spleen).

[0387] 181. The method of any one of embodiments 146-180, wherein the administration results in increased level of GBA protein expression in a cell or tissue of the subject, relative to reference level, e.g., a subject that has not received treatment, e.g., has not been administered the AAV particle.

[0388] 182. The method of any one of embodiments 146-181, which further comprises evaluating, e.g., measuring, the level of GCase activity in the subject, e.g., in a cell or tissue of the subject, optionally wherein the level of GCase activity is measured by an assay described herein, e.g., assay as described in Example 7.

[0389] 183. The method of any one of embodiments 146-182, wherein the administration results in an increase in at least one, two, or all of:

[0390] (i) the level of GCase activity in a cell, tissue, (e.g., a cell or tissue of the CNS, e.g., the cortex, striatum, thalamus, cerebellum, and/or brainstem), and/or fluid (e.g., CSF and/or serum), of the subject, optionally wherein the level of GCase activity is increased by at least 3, 4, 4.5, 4.6, 4.7, 4.8, 4.9, 5, 5.1, 5.2, 5.3, 5.4, or 5.5 fold, as compared to a reference level, e.g., a subject that has not received treatment, e.g., has not been administered the AAV particle;

[0391] (ii) the level of viral genomes (VG) per cell in a CNS tissue (e.g., the cortex, striatum, thalamus, cerebellum, brainstem, and/or spinal cord) of the subject, optionally wherein the VG level is increased by greater than 50 VGs per cell, as compared to a peripheral tissue, wherein the level of VGs per cell is at least 4-10 fold lower than the levels in the CNS tissue, e.g., as measured by an assay as described herein; and/or

[0392] (iii) the level of GBA mRNA expression in a cell or tissue (e.g. a cell or tissue of the CNS, e.g., the cortex, thalamus, and/or brainstem), optionally wherein the level of GBA mRNA is increased by at least 100-1300 fold, e.g., 100 fold, 200 fold, 500 fold, 600 fold, 850 fold, 900 fold, 950 fold, 1000 fold, 1050 fold, 1100 fold, 1150 fold, 1200 fold, 1250 fold, or 1300 fold as compared to a reference level, e.g., a subject that has not received treatment (e.g., has not been administered the AAV particle), or endogenous GBA mRNA levels, e.g., as measured by an assay as described herein.

[0393] 184. The method of any one of embodiments 146-183, wherein further comprising administration of an additional therapeutic agent and/or therapy suitable for treatment or prevention of the disease associated GBA expression, the neurodegenerative disorder, and/or the neuromuscular disorder.

[0394] 185. The method of embodiment 184, wherein the additional therapeutic agent comprises enzyme replacement therapy (ERT) (e.g., imiglucerase, velaglucerase alfa, or taliglucerase alfa); substrate reduction therapy (SRT) (e.g., eliglustat or miglustat), blood transfusion, levodopa, carbidopa, Safinamide, dopamine agonists (e.g., pramipexole, rotigotine, or ropinirole), anticholinergics (e.g., benztropine or trihexyphenidyl), cholinesterase inhibitors (e.g., rivastigmine, donepezil, or galantamine), an N-methyl-d-aspartate (NMDA) receptor antagonist (e.g., memantine), or a combination thereof.

[0395] 186. The isolated nucleic acid of any one of embodiments 1-6 or 9-49, the viral genome of any one of embodiments 7-120, the AAV particle of any one of embodiments 122-132, or the pharmaceutical composition of embodiment 145 for use in the manufacture of a medicament.

[0396] 187. The isolated nucleic acid of any one of embodiments 1-6 or 9-49, the viral genome of any one of embodiments 7-120, the AAV particle of any one of embodiments 122-132, or the pharmaceutical composition of embodiment 145 for use in the treatment of a disease associated with GBA expression, a neuromuscular and/or a neurodegenerative disorder.

[0397] 188. Use of an effective amount of an AAV particle comprising the genome of any one of embodiments 7-120, an AAV particle comprising a genome comprising the nucleic acid of any one of embodiments 1-6 or 9-49, the AAV particle of any one of embodiments 122-132, or the pharmaceutical composition of embodiment 145, in the manufacture of a medicament for the treatment of a disease associated with GBA expression, a neuromuscular and/or a neurodegenerative disorder.

[0398] 189. An adeno-associated viral (AAV) vector genome comprising a sequence selected from any of SEQ ID NO: 1759-1771 190. An AAV particle comprising the AAV vector genome of claim 189 and a capsid selected from a group consisting of those listed in Table 1.

[0399] 191. The AAV particle of claim 190, wherein the capsid comprises an AAV2 serotype. 192. A pharmaceutical composition comprising the AAV particle of claim 190 or claim 191.

[0400] 193. A method of treating a neurological or neuromuscular disorder, said method comprising administering to a subject the pharmaceutical composition of claim 192.

[0401] 194. The method of claim 193, wherein the neurological or neuromuscular disorder is Parkinson's Disease, Gaucher disease, or Dementia with Lewy Bodies, or a related disorder.

[0402] 195. The method of claim 194, wherein the neurological or neuromuscular disorder is a disorder associated with decreased GCase protein levels.

[0403] The details of various aspects or embodiments of the present disclosure are set forth below. Other features, objects, and advantages of the disclosure will be apparent from the description and the claims. In the description, the singular forms also include the plural unless the context clearly dictates otherwise. Unless defined otherwise, all technical and scientific terms used herein have the same meaning as commonly understood by one of ordinary skill in the art in the field of this disclosure. In the case of conflict, the present description will control.

### BRIEF DESCRIPTION OF THE DRAWINGS

[0404] FIGS. 1A-1B depict LC-MS/MS results quantifying levels of GBA substrate glucosylsphingosine (GlcSph) in cell lysates of Gaucher disease patient derived fibroblasts (GD1 patient GM04394, GD1 Patient GM00852, and GD2 patient GM00877) and healthy control fibroblasts (CLT GM05758, CTL GM02937 and CTL GM08402). Data are shown as GlcSph normalized to actin (FIG. 1A) or normalized to lysosomal protein Lamp1 (FIG. 1B).

[0405] FIG. 1C depicts GBA protein levels detected in lysates of Gaucher patient-derived fibroblasts (GD1 and GD2) compared to healthy control fibroblast (HC) by LC-MS/MS. Data are shown as concentration of GBA protein (ng) relative to total protein (mg).

[0406] FIGS. 2A-2B depict GCase activity (RFU/mL normalized to mg of protein) in GD-II GM00877 fibroblast cell pellets (FIG. 2A) or conditioned media (FIG. 2B) at Day 7 after transduction with AAV2 viral particles comprising the viral genome construct on the X-axis from left to right: GBA_VG1 (SEQ ID NO: 1759), GBA_VG9 (SEQ ID NO: 1767), GBA_VG10 (SEQ ID NO: 1768), GBA_VG11 (SEQ ID NO: 1769), GBA_VG6 (SEQ ID NO: 1764), GBA_VG7 (SEQ ID NO: 1765), GBA_VG12 (SEQ ID NO: 1770), GBA_VG3 (SEQ ID NO: 1761), GBA_VG4 (SEQ ID NO: 1762), GBA_VG5 (SEQ ID NO: 1763), and GBA_VG13 (SEQ ID NO: 1771), at MOI of 10^{3.5}. The dotted line indicates the baseline level (vehicle treatment).

[0407] FIG. 3 depicts levels of GBA substrate glucosylsphingosine (GlcSph) in the cell lysates (ng/mg Lamp1) collected from GD-II patient fibroblasts (GM00877) at Day 7 after transduction with transduction of a no AAV control or AAV2 vectors comprising the viral genome indicated on the X-axis (from left to right: GBA_VG1 (SEQ ID NO: 1759), GBA_VG9 (SEQ ID NO: 1767), GBA_VG6 (SEQ ID NO: 1764), GBA_VG7 (SEQ ID NO: 1765), GBA_VG3 (SEQ ID NO: 1761), GBA_VG4 (SEQ ID NO: and GBA_VG5(SEQ ID NO: 1763)).

[0408] FIG. 4A depicts GCase activity measured as RFU per mL normalized to mg of protein in GD-II patient fibroblasts (GD-II GM00877) on day 7 post-transduction with AAV2 vectors comprising the viral genome indicated on the X-axis (from left to right: GBA_VG1 (SEQ ID NO: 1759), GBA_VG14 (SEQ ID NO: 1809), GBA_VG15 (SEQ ID NO: 1810), GBA_VG16 (SEQ ID NO: 1811), GBA_VG17 (SEQ ID NO: 1812), GBA_VG18 (SEQ ID NO: 1813), GBA_VG19 (SEQ ID NO: 1814), and GBA_VG20 (SEQ ID NO: 1815)) at an MOI of 10^{2.5} (first bar), 10³ (second bar), 10^{3.5} and 10⁴ (third bar). FIG. 4B depicts the level of the GBA substrate glucosylsphingosine (GlcSph, ng/mg Lamp1) in the cell lysate from GD-II patient-derived fibroblasts at day 7 after transduction with AAV2 vectors comprising the viral genome indicated on the X-axis (from left to right: GBA_VG1 (SEQ ID NO: 1759), GBA_VG14 (SEQ ID NO: 1809), GBA_VG15 (SEQ ID NO: 1810), GBA_VG16 (SEQ ID NO: 1811), GBA_VG17 (SEQ ID NO: 1812), GBA_VG18 (SEQ ID NO: 1813), GBA_VG19 (SEQ ID NO: 1814), and GBA_VG20 (SEQ ID NO: 1815)) at an MOI of 10^{2.5} (first bar), 10³ (second bar), 10^{3.5} and 10⁴ (third bar).

[0409] FIG. 5 depicts the GC content and distribution of a first codon-optimized nucleotide sequence encoding a GBA protein of SEQ ID NO: 1773, a second codon-optimized nucleotide sequence encoding a GBA protein of SEQ ID NO: 1781, and a wild-type nucleotide sequence encoding a GBA protein of SEQ ID NO: 1777.

[0410] FIGS. 6A-6B compare activity of a GBA protein expressed by AAV2 vectorized viral genome constructs: GBA_VG1 (SEQ ID NO: 1759), GBA_VG17 (SEQ ID NO: 1812), and GBA_VG21 (SEQ ID NO: 1816). FIG. 6A depicts the GCase activity (RFU/mL) normalized to mg of protein in GD-II patient fibroblasts treated with AAV2 viral particles at an MOI of 10^{4.5} comprising the viral genome constructs indicated on the X-axis (GBA_VG1 (SEQ ID NO: 1759), GBA_VG17 (SEQ ID NO: 1812), and GBA_VG21 (SEQ ID NO: 1816)) compared to a no AAV control. FIG. 6B depicts glucosylsphingosine (GlcSph) (ng/mL Lamp1) in the cell lysate from GD-II patient fibroblasts treated with AAV2 viral particles comprising the viral genome constructs indicated on the X-axis (from left to right GBA_VG1 (SEQ ID NO: 1759), GBA_VG17 (SEQ ID NO: 1812), and GBA_VG21 (SEQ ID NO: 1816)) at an MOI of 10⁶, or a no AAV treatment control.

[0411] FIG. 7 depicts the GCase activity (RFU/mL) per mg of protein in rat embryonic dorsal root ganglion (DRG) neurons transduced an AAV2 vector comprising GBA_VG33 (SEQ ID NO: 1828) or an AAV2 vector comprising GBA_VG17 (SEQ ID NO: 1812) at an MOI of 10^{3.5} or 10^{4.5}, compared to a no AAV control.

[0412] FIG. 8 depicts the biodistribution (VG/cell) versus GCase activity (RFU/mL, fold over endogenous GCase activity, normalized to mg of protein) in the cortex, striatum, thalamus, brainstem, cerebellum, and liver in wild-type mice at one-month post-IV injection of VOY101.GBA_VG17 (SEQ ID NO: 1812) at 2e13 vg/kg.

### DETAILED DESCRIPTION

### Overview

[0413] Described herein, inter alia, are compositions comprising isolated, e.g., recombinant, viral particles, e.g., AAV particles, for delivery, e.g., vectorized delivery, of a protein, e.g., a GBA protein, and methods of making and using the same. Adeno-associated viruses (AAV) are small non-enveloped icosahedral capsid viruses of the Parvoviridae family characterized by a single stranded DNA viral genome. Parvoviridae family viruses consist of two subfamilies: Parvovirinae, which infect vertebrates, and Densovirinae, which infect invertebrates. The Parvoviridae family includes the Dependovirus genus which includes AAV, capable of replication in vertebrate hosts including, but not limited to, human, primate, bovine, canine, equine, and ovine species.

[0414] The parvoviruses and other members of the Parvoviridae family are generally described in Kenneth I. Berns, “Parvoviridae: The Viruses and Their Replication,” Chapter 69 in Fields Virology (3d Ed. 1996), the contents of which are incorporated by reference in their entirety.

[0415] AAV have proven to be useful as a biological tool due to their relatively simple structure, their ability to infect a wide range of cells (including quiescent and dividing cells) without integration into the host genome and without replicating, and their relatively benign immunogenic profile. The genome of the virus may be manipulated to contain a minimum of components for the assembly of a functional recombinant virus, or viral particle, which is loaded with or engineered to target a particular tissue and express or deliver a desired payload. The genome of the virus may be modified to contain a minimum of components for the assembly of a functional recombinant virus, or viral particle, which is loaded with or engineered to express or deliver a desired nucleic acid construct or payload, e.g., a transgene, polypeptide-encoding polynucleotide, e.g., a GBA protein, e.g., a GCase, GCase and PSAP, GCase and SapA, or GCase and SapC, GCase and a cell penetration peptide (e.g., an ApoEII peptide, a TAT peptide, or an ApoB peptide), or GCase and a lysosomal targeting sequence (LTS), which may be delivered to a target cell, tissue, or organism. In some embodiments, the target cell is a CNS cell. In some embodiments, the target tissue is a CNS tissue. The target CNS tissue may be brain tissue. In some embodiments, the brain target comprises caudate, putamen, thalamus, superior colliculus, cortex, and corpus collosum.

[0416] Gene therapy presents an alternative approach for PD and related diseases sharing single-gene etiology, such as Gaucher disease and Dementia with Lewy Bodies and related disorders. AAVs are commonly used in gene therapy approaches as a result of a number of advantageous features. Without wishing to be bound by theory, it is believed in some embodiments, that expression vectors, e.g., an adeno-associated viral vector (AAVs) or AAV particle, e.g., an AAV particle described herein, can be used to administer and/or deliver a GBA protein (e.g., GCase and related proteins), in order to achieve sustained, high concentrations, allowing for longer lasting efficacy, fewer dose treatments, broad biodistribution, and/or more consistent levels of the GBA protein, relative to a non-AAV therapy.

[0417] As demonstrated in the Examples herein below, the compositions and methods described herein provides improved features compared to prior enzyme replacement approaches, including (i) increased GCase activity in a cell, tissue, (e.g., a cell or tissue of the CNS, e.g., the cortex, striatum, thalamus, cerebellum, and/or brainstem), and/or fluid (e.g., CSF and/or serum), of the subject; (ii) increased biodistribution throughout the CNS (e.g., the cortex, striatum, thalamus, cerebellum, brainstem, and/or spinal cord), and the periphery (e.g., the liver), and/or (iii) elevated payload expression, e.g., GBA mRNA expression, in multiple brain regions (e.g., cortex, thalamus, and brain stem) and the periphery (e.g., the liver). In some embodiments, an AAV viral genome encoding a GBA protein described herein which comprise an optimized nucleotide sequence encoding the GBA protein (e.g., SEQ ID NO: 1773) result in high biodistribution in the CNS; increased GCase activity in the CNS, peripheral tissues, and/or fluid; and successful transgene transcription and expression. The compositions and methods described herein can be used in the treatment of disorders associated with a lack of a GBA protein and/or GCase activity, such as neuronopathic (affects the CNS) and non-neuronopathic (affects non-CNS) Gaucher's disease (e.g., Type 1 GD, Type 2 GD, or Type 3 GD), a PD associated with a mutation in a GBA gene, and a dementia with Lewy Bodies (DLB).

### I. Compositions

[0418] Adeno-associated viral (AAV) vectors

[0419] AAV have a genome of about 5,000 nucleotides in length which contains two open reading frames encoding the proteins responsible for replication (Rep) and the structural protein of the capsid (Cap). The open reading frames are flanked by two Inverted Terminal Repeat (ITR) sequences, which serve as the origin of replication of the viral genome. The wild-type AAV viral genome comprises nucleotide sequences for two open reading frames, one for the four non-structural Rep proteins (Rep78, Rep68, Rep52, Rep40, encoded by Rep genes) and one for the three capsid, or structural, proteins (VP1, VP2, VP3, encoded by capsid genes or Cap genes). The Rep proteins are important for replication and packaging, while the capsid proteins are assembled to create the protein shell of the AAV, or AAV capsid. Alternative splicing and alternate initiation codons and promoters result in the generation of four different Rep proteins from a single open reading frame and the generation of three capsid proteins from a single open reading frame. Though it varies by AAV serotype, as a non-limiting example, for AAV9/hu.14 (SEQ ID NO: 123 of U.S. Pat. No. 7,906,111, the contents of which are herein incorporated by reference in their entirety) VP1 refers to amino acids 1-736, VP2 refers to amino acids 138-736, and VP3 refers to amino acids 203-736. As another non-limiting example, VP1 refers to amino acids 1-743 numbered according to SEQ ID NO: 1, VP2 refers to amino acids 138-743 numbered according to SEQ ID NO: 1, and VP3 refers to amino acids 203-743 numbered according to SEQ ID NO: 1. In other words, VP1 is the full-length capsid sequence, while VP2 and VP3 are shorter components of the whole. As a result, changes in the sequence in the VP3 region, are also changes to VP1 and VP2, however, the percent difference as compared to the parent sequence will be greatest for VP3 since it is the shortest sequence of the three. Though described here in relation to the amino acid sequence, the nucleic acid sequence encoding these proteins can be similarly described. Together, the three capsid proteins assemble to create the AAV capsid protein. While not wishing to be bound by theory, the AAV capsid protein typically comprises a molar ratio of 1:1:10 of VP1:VP2:VP3. As used herein, an “AAV serotype” is defined primarily by the AAV capsid. In some instances, the ITRs are also specifically described by the AAV serotype (e.g., AAV2/9).

[0420] The AAV vector typically requires a co-helper (e.g., adenovirus) to undergo productive infection in cells. In the absence of such helper functions, the AAV virions essentially enter host cells but do not integrate into the cells' genome.

[0421] AAV vectors have been investigated for delivery of gene therapeutics because of several unique features. Non-limiting examples of the features include (i) the ability to infect both dividing and non-dividing cells; (ii) a broad host range for infectivity, including human cells; (iii) wild-type AAV has not been associated with any disease and has not been shown to replicate in infected cells; (iv) the lack of cell-mediated immune response against the vector, and (v) the non-integrative nature in a host chromosome thereby reducing potential for long-term genetic alterations. Moreover, infection with AAV vectors has minimal influence on changing the pattern of cellular gene expression (Stilwell and Samulski et al., Biotechniques, 2003, 34, 148, the contents of which are herein incorporated by reference in their entirety).

[0422] Typically, AAV vectors for GCase protein delivery may be recombinant viral vectors which are replication defective as they lack sequences encoding functional Rep and Cap proteins within the viral genome. In some cases, the defective AAV vectors may lack most or all coding sequences and essentially only contain one or two AAV ITR sequences and a payload sequence. In certain embodiments, the viral genome encodes GCase protein. In some embodiments, the viral genome encodes GCase protein and SapA protein. In some embodiments, the viral genome encodes GCase protein and SapC protein. For example, the viral genome can encode human GCase, human GCase+SapA, or human GCase+SapC protein(s).

[0423] In some embodiments, the viral genome may comprise one or more lysosomal targeting sequences (LTS).

[0424] In some embodiments, the viral genome may comprise one or more cell penetrating peptide sequences (CPP).

[0425] In some embodiments, a viral genome may comprise one or more lysosomal targeting sequences and one or more cell penetrating sequences.

[0426] In some embodiments, the AAV particles of the present disclosure may be introduced into mammalian cells.

[0427] AAV vectors may be modified to enhance the efficiency of delivery. Such modified AAV vectors of the present disclosure can be packaged efficiently and can be used to successfully infect the target cells at high frequency and with minimal toxicity.

[0428] In other embodiments, AAV particles of the present disclosure may be used to deliver GCase protein to the central nervous system (see, e.g., U.S. Pat. No. 6,180,613; the contents of which are herein incorporated by reference in their entirety) or to specific tissues of the CNS.

[0429] As used herein, the term “AAV vector” or “AAV particle” comprises a capsid and a viral genome comprising a payload. As used herein, “payload” or “payload region” refers to one or more polynucleotides or polynucleotide regions encoded by or within a viral genome or an expression product of such polynucleotide or polynucleotide region, e.g., a transgene, a polynucleotide encoding a polypeptide or multi-polypeptide, e.g., GCase protein.

[0430] It is understood that the compositions described herein may have additional conservative or non-essential amino acid substitutions, which do not have a substantial effect on their functions.

### AAV Serotypes

[0431] AAV particles of the present disclosure may comprise or be derived from any natural or recombinant AAV serotype. According to the present disclosure, the AAV particles may utilize or be based on a serotype or include a peptide selected from any of the following VOY101, VOY201, AAVPHP.B (PHP.B), AAVPHP.A (PHP.A), AAVG2B-26, AAVG2B-13, AAVTH1.1-32, AAVTH1.1-35, AAVPHP.B2 (PHP.B2), AAVPHP.B3 (PHP.B3), AAVPHP.N/PHP.B-DGT, AAVPHP.B-EST, AAVPHP.B-GGT, AAVPHP.B-ATP, AAVPHP.B-ATT-T, AAVPHP.B-DGT-T, AAVPHP.B-GGT-T, AAVPHP.B-SGS, AAVPHP.B-AQP, AAVPHP.B-QQP, AAVPHP.B-SNP(3), AAVPHP.B-SNP, AAVPHP.B-QGT, AAVPHP.B-NQT, AAVPHP.B-EGS, AAVPHP.B-SGN, AAVPHP.B-EGT, AAVPHP.B-DST, AAVPHP.B-DST, AAVPHP.B-STP, AAVPHP.B-PQP, AAVPHP.B-SQP, AAVPHP.B-QLP, AAVPHP.B-TMP, AAVPHP.B-TTP, AAVPHP.S/G2A12, AAVG2A15/G2A3 (G2A3), AAVG2B4 (G2B4), AAVG2B5 (G2B5), PHP.S, AAV1, AAV2, AAV2G9, AAV3, AAV3a, AAV3b, AAV3-3, AAV4, AAV4-4, AAV5, AAV6, AAV6.1, AAV6.2, AAV6.1.2, AAV7, AAV7.2, AAV8, AAV9, AAV9.11, AAV9.13, AAV9.16, AAV9.24, AAV9.45, AAV9.47, AAV9.61, AAV9.68, AAV9.84, AAV9.9, AAV10, AAV11, AAV12, AAV16.3, AAV24.1, AAV27.3, AAV42.12, AAV42-1b, AAV42-2, AAV42-3a, AAV42-3b, AAV42-4, AAV42-5a, AAV42-5b, AAV42-6b, AAV42-8, AAV42-10, AAV42-11, AAV42-12, AAV42-13, AAV42-15, AAV42-aa, AAV43-1, AAV43-12, AAV43-20, AAV43-21, AAV43-23, AAV43-25, AAV43-5, AAV44.1, AAV44.2, AAV44.5, AAV223.1, AAV223.2, AAV223.4, AAV223.5, AAV223.6, AAV223.7, AAV1-7/rh.48, AAV1-8/rh.49, AAV2-15/rh.62, AAV2-3/rh.61, AAV2-4/rh.50, AAV2-5/rh.51, AAV3.1/hu.6, AAV3.1/hu.9, AAV3-9/rh.52, AAV3-11/rh.53, AAV4-8/r11.64, AAV4-9/rh.54, AAV4-19/rh.55, AAV5-3/rh.57, AAV5-22/rh.58, AAV7.3/hu.7, AAV16.8/hu.10, AAV16.12/hu.11, AAV29.3/bb.1, AAV29.5/bb.2, AAV106.1/hu.37, AAV114.3/hu.40, AAV127.2/hu.41, AAV127.5/hu.42, AAV128.3/hu.44, AAV130.4/hu.48, AAV145.1/hu.53, AAV145.5/hu.54, AAV145.6/hu.55, AAV161.10/hu.60, AAV161.6/hu.61, AAV33.12/hu.17, AAV33.4/hu.15, AAV33.8/hu.16, AAV52/hu.19, AAV52.1/hu.20, AAV58.2/hu.25, AAVA3.3, AAVA3.4, AAVA3.5, AAVA3.7, AAVC1, AAVC2, AAVC5, AAV-DJ, AAV-DJ8, AAVF3, AAVF5, AAVH2, AAVrh.72, AAVhu.8, AAVrh.68, AAVrh.70, AAVpi.1, AAVpi.3, AAVpi.2, AAVrh.60, AAVrh.44, AAVrh.65, AAVrh.55, AAVrh.47, AAVrh.69, AAVrh.45, AAVrh.59, AAVhu.12, AAVH6, AAVLK03, AAVH-1/hu.1, AAVH-5/hu.3, AAVLG-10/rh.40, AAVLG-4/rh.38, AAVLG-9/hu.39, AAVN721-8/rh.43, AAVCh.5, AAVCh.5R1, AAVcy.2, AAVcy.3, AAVcy.4, AAVcy.5, AAVCy.5R1, AAVCy.5R2, AAVCy.5R3, AAVCy.5R4, AAVcy.6, AAVhu.1, AAVhu.2, AAVhu.3, AAVhu.4, AAVhu.5, AAVhu.6, AAVhu.7, AAVhu.9, AAVhu.10, AAVhu.11, AAVhu.13, AAVhu.15, AAVhu.16, AAVhu.17, AAVhu.18, AAVhu.20, AAVhu.21, AAVhu.22, AAVhu.23.2, AAVhu.24, AAVhu.25, AAVhu.27, AAVhu.28, AAVhu.29, AAVhu.29R, AAVhu.31, AAVhu.32, AAVhu.34, AAVhu.35, AAVhu.37, AAVhu.39, AAVhu.40, AAVhu.41, AAVhu.42, AAVhu.43, AAVhu.44, AAVhu.44R1, AAVhu.44R2, AAVhu.44R3, AAVhu.45, AAVhu.46, AAVhu.47, AAVhu.48, AAVhu.48R1, AAVhu.48R2, AAVhu.48R3, AAVhu.49, AAVhu.51, AAVhu.52, AAVhu.54, AAVhu.55, AAVhu.56, AAVhu.57, AAVhu.58, AAVhu.60, AAVhu.61, AAVhu.63, AAVhu.64, AAVhu.66, AAVhu.67, AAVhu.14/9, AAVhu.t 19, AAVrh.2, AAVrh.2R, AAVrh.8, AAVrh.8R, AAVrh.10, AAVrh.12, AAVrh.13, AAVrh.13R, AAVrh.14, AAVrh.17, AAVrh.18, AAVrh.19, AAVrh.20, AAVrh.21, AAVrh.22, AAVrh.23, AAVrh.24, AAVrh.25, AAVrh.31, AAVrh.32, AAVrh.33, AAVrh.34, AAVrh.35, AAVrh.36, AAVrh.37, AAVrh.37R2, AAVrh.38, AAVrh.39, AAVrh.40, AAVrh.46, AAVrh.48, AAVrh.48.1, AAVrh.48.1.2, AAVrh.48.2, AAVrh.49, AAVrh.51, AAVrh.52, AAVrh.53, AAVrh.54, AAVrh.56, AAVrh.57, AAVrh.58, AAVrh.61, AAVrh.64, AAVrh.64R1, AAVrh.64R2, AAVrh.67, AAVrh.73, AAVrh.74, AAVrh8R, AAVrh8R A586R mutant, AAVrh8R R533A mutant, AAAV, BAAV, caprine AAV, bovine AAV, AAVhE1.1, AAVhEr1.5, AAVhER1.14, AAVhEr1.8, AAVhEr1.16, AAVhEr1.18, AAVhEr1.35, AAVhEr1.7, AAVhEr1.36, AAVhEr2.29, AAVhEr2.4, AAVhEr2.16, AAVhEr2.30, AAVhEr2.31, AAVhEr2.36, AAVhER1.23, AAVhEr3.1, AAV2.5T, AAV-PAEC, AAV-LK01, AAV-LK02, AAV-LK03, AAV-LK04, AAV-LK05, AAV-LK06, AAV-LK07, AAV-LK08, AAV-LK09, AAV-LK10, AAV-LK11, AAV-LK12, AAV-LK13, AAV-LK14, AAV-LK15, AAV-LK16, AAV-LK17, AAV-LK18, AAV-LK19, AAV-PAEC2, AAV-PAEC4, AAV-PAEC6, AAV-PAEC7, AAV-PAEC8, AAV-PAEC11, AAV-PAEC12, AAV-2-pre-miRNA-101, AAV-8h, AAV-8b, AAV-h, AAV-b, AAV SM 10-2, AAV Shuffle 100-1, AAV Shuffle 100-3, AAV Shuffle 100-7, AAV Shuffle 10-2, AAV Shuffle 10-6, AAV Shuffle 10-8, AAV Shuffle 100-2, AAV SM 10-1, AAV SM 10-8, AAV SM 100-3, AAV SM 100-10, BNP61 AAV, BNP62 AAV, BNP63 AAV, AAVrh.50, AAVrh.43, AAVrh.62, AAVrh.48, AAVhu.19, AAVhu.11, AAVhu.53, AAV4-8/rh.64, AAVLG-9/hu.39, AAV54.5/hu.23, AAV54.2/hu.22, AAV54.7/hu.24, AAV54.1/hu.21, AAV54.4R/hu.27, AAV46.2/hu.28, AAV46.6/hu.29, AAV128.1/hu.43, true type AAV (ttAAV), UPENN AAV 10, Japanese AAV 10 serotypes, AAV CBr-7.1, AAV CBr-7.10, AAV CBr-7.2, AAV CBr-7.3, AAV CBr-7.4, AAV CBr-7.5, AAV CBr-7.7, AAV CBr-7.8, AAV CBr-B7.3, AAV CBr-B7.4, AAV CBr-E1, AAV CBr-E2, AAV CBr-E3, AAV CBr-E4, AAV CBr-E5, AAV CBr-e5, AAV CBr-E6, AAV CBr-E7, AAV CBr-E8, AAV CHt-1, AAV CHt-2, AAV CHt-3, AAV CHt-6.1, AAV CHt-6.10, AAV CHt-6.5, AAV CHt-6.6, AAV CHt-6.7, AAV CHt-6.8, AAV CHt-P1, AAV CHt-P2, AAV CHt-P5, AAV CHt-P6, AAV CHt-P8, AAV CHt-P9, AAV CKd-1, AAV CKd-10, AAV CKd-2, AAV CKd-3, AAV CKd-4, AAV CKd-6, AAV CKd-7, AAV CKd-8, AAV CKd-B1, AAV CKd-B2, AAV CKd-B3, AAV CKd-B4, AAV CKd-B5, AAV CKd-B6, AAV CKd-B7, AAV CKd-B8, AAV CKd-H1, AAV CKd-H2, AAV CKd-H3, AAV CKd-H4, AAV CKd-H5, AAV CKd-H6, AAV CKd-N3, AAV CKd-N4, AAV CKd-N9, AAV CLg-F1, AAV CLg-F2, AAV CLg-F3, AAV CLg-F4, AAV CLg-F5, AAV CLg-F6, AAV CLg-F7, AAV CLg-F8, AAV CLv-1, AAV CLv1-1, AAV Clv1-10, AAV CLv1-2, AAV CLv-12, AAV CLv1-3, AAV CLv-13, AAV CLv1-4, AAV Clv1-7, AAV Clv1-8, AAV Clv1-9, AAV CLv-2, AAV CLv-3, AAV CLv-4, AAV CLv-6, AAV CLv-8, AAV CLv-D1, AAV CLv-D2, AAV CLv-D3, AAV CLv-D4, AAV CLv-D5, AAV CLv-D6, AAV CLv-D7, AAV CLv-D8, AAV CLv-E1, AAV CLv-K1, AAV CLv-K3, AAV CLv-K6, AAV CLv-L4, AAV CLv-L5, AAV CLv-L6, AAV CLv-M1, AAV CLv-M11, AAV CLv-M2, AAV CLv-M5, AAV CLv-M6, AAV CLv-M7, AAV CLv-M8, AAV CLv-M9, AAV CLv-R1, AAV CLv-R2, AAV CLv-R3, AAV CLv-R4, AAV CLv-R5, AAV CLv-R6, AAV CLv-R7, AAV CLv-R8, AAV CLv-R9, AAV CSp-1, AAV CSp-10, AAV CSp-11, AAV CSp-2, AAV CSp-3, AAV CSp-4, AAV CSp-6, AAV CSp-7, AAV CSp-8, AAV CSp-8.10, AAV CSp-8.2, AAV CSp-8.4, AAV CSp-8.5, AAV CSp-8.6, AAV CSp-8.7, AAV CSp-8.8, AAV CSp-8.9, AAV CSp-9, AAV.hu.48R3, AAV.VR-355, AAV3B, AAV4, AAV5, AAVF1/HSC1, AAVF11/HSC11, AAVF12/HSC12, AAVF13/HSC13, AAVF14/HSC14, AAVF15/HSC15, AAVF16/HSC16, AAVF17/HSC17, AAVF2/HSC2, AAVF3/HSC3, AAVF4/HSC4, AAVF5/HSC5, AAVF6/HSC6, AAVF7/HSC7, AAVF8/HSC8, and/or AAVF9/HSC9 and variants thereof.

[0432] In some embodiments, the AAV serotype may be, or have, a sequence as described in United States Publication No. US20030138772, the contents of which are herein incorporated by reference in their entirety, such as, but not limited to, AAV1 (SEQ ID NO: 6 and 64 of US20030138772), AAV2 (SEQ ID NO: 7 and 70 of US20030138772), AAV3 (SEQ ID NO: 8 and 71 of US20030138772), AAV4 (SEQ ID NO: 63 of US20030138772), AAV5 (SEQ ID NO: 114 of US20030138772), AAV6 (SEQ ID NO: 65 of US20030138772), AAV7 (SEQ ID NO: 1-3 of US20030138772), AAV8 (SEQ ID NO: 4 and 95 of US20030138772), AAV9 (SEQ ID NO: 5 and 100 of US20030138772), AAV10 (SEQ ID NO: 117 of US20030138772), AAV11 (SEQ ID NO: 118 of US20030138772), AAV12 (SEQ ID NO: 119 of US20030138772), AAVrh10 (amino acids 1 to 738 of SEQ ID NO: 81 of US20030138772), AAV16.3 (US20030138772 SEQ ID NO: 10), AAV29.3/bb.1 (US20030138772 SEQ ID NO: 11), AAV29.4 (US20030138772 SEQ ID NO: 12), AAV29.5/bb.2 (US20030138772 SEQ ID NO: 13), AAV1.3 (US20030138772 SEQ ID NO: 14), AAV13.3 (US20030138772 SEQ ID NO: 15), AAV24.1 (US20030138772 SEQ ID NO: 16), AAV27.3 (US20030138772 SEQ ID NO: 17), AAV7.2 (US20030138772 SEQ ID NO: 18), AAVC1 (US20030138772 SEQ ID NO: 19), AAVC3 (US20030138772 SEQ ID NO: 20), AAVC5 (US20030138772 SEQ ID NO: 21), AAVF1 (US20030138772 SEQ ID NO: 22), AAVF3 (US20030138772 SEQ ID NO: 23), AAVF5 (US20030138772 SEQ ID NO: 24), AAVH6 (US20030138772 SEQ ID NO: 25), AAVH2 (US20030138772 SEQ ID NO: 26), AAV42-8 (US20030138772 SEQ ID NO: 27), AAV42-15 (US20030138772 SEQ ID NO: 28), AAV42-5b (US20030138772 SEQ ID NO: 29), AAV42-1b (US20030138772 SEQ ID NO: 30), AAV42-13 (US20030138772 SEQ ID NO: 31), AAV42-3a (US20030138772 SEQ ID NO: 32), AAV42-4 (US20030138772 SEQ ID NO: 33), AAV42-5a (US20030138772 SEQ ID NO: 34), AAV42-10 (US20030138772 SEQ ID NO: 35), AAV42-3b (US20030138772 SEQ ID NO: 36), AAV42-11 (US20030138772 SEQ ID NO: 37), AAV42-6b (US20030138772 SEQ ID NO: 38), AAV43-1 (US20030138772 SEQ ID NO: 39), AAV43-5 (US20030138772 SEQ ID NO: 40), AAV43-12 (US20030138772 SEQ ID NO: 41), AAV43-20 (US20030138772 SEQ ID NO: 42), AAV43-21 (US20030138772 SEQ ID NO: 43), AAV43-23 (US20030138772 SEQ ID NO: 44), AAV43-25 (US20030138772 SEQ ID NO: 45), AAV44.1 (US20030138772 SEQ ID NO: 46), AAV44.5 (US20030138772 SEQ ID NO: 47), AAV223.1 (US20030138772 SEQ ID NO: 48), AAV223.2 (US20030138772 SEQ ID NO: 49), AAV223.4 (US20030138772 SEQ ID NO: 50), AAV223.5 (US20030138772 SEQ ID NO: 51), AAV223.6 (US20030138772 SEQ ID NO: 52), AAV223.7 (US20030138772 SEQ ID NO: 53), AAVA3.4 (US20030138772 SEQ ID NO: 54), AAVA3.5 (US20030138772 SEQ ID NO: 55), AAVA3.7 (US20030138772 SEQ ID NO: 56), AAVA3.3 (US20030138772 SEQ ID NO: 57), AAV42.12 (US20030138772 SEQ ID NO: 58), AAV44.2 (US20030138772 SEQ ID NO: 59), AAV42-2 (US20030138772 SEQ ID NO: 9), or variants thereof.

[0433] In some embodiments, the AAV serotype may be, or have, a sequence as described in United States Publication No. US20150159173, the contents of which are herein incorporated by reference in their entirety, such as, but not limited to, AAV2 (SEQ ID NO: 7 and 23 of US20150159173), rh20 (SEQ ID NO: 1 of US20150159173), rh32/33 (SEQ ID NO: 2 of US20150159173), rh39 (SEQ ID NO: 3, 20 and 36 of US20150159173), rh46 (SEQ ID NO: 4 and 22 of US20150159173), rh73 (SEQ ID NO: 5 of US20150159173), rh74 (SEQ ID NO: 6 of US20150159173), AAV6.1 (SEQ ID NO: 29 of US20150159173), rh.8 (SEQ ID NO: 41 of US20150159173), rh.48.1 (SEQ ID NO: 44 of US20150159173), hu.44 (SEQ ID NO: 45 of US20150159173), hu.29 (SEQ ID NO: 42 of US20150159173), hu.48 (SEQ ID NO: 38 of US20150159173), rh54 (SEQ ID NO: 49 of US20150159173), AAV2 (SEQ ID NO: 7 of US20150159173), cy.5 (SEQ ID NO: 8 and 24 of US20150159173), rh.10 (SEQ ID NO: 9 and 25 of US20150159173), rh.13 (SEQ ID NO: 10 and 26 of US20150159173), AAV1 (SEQ ID NO: 11 and 27 of US20150159173), AAV3 (SEQ ID NO: 12 and 28 of US20150159173), AAV6 (SEQ ID NO: 13 and 29 of US20150159173), AAV7 (SEQ ID NO: 14 and 30 of US20150159173), AAV8 (SEQ ID NO: 15 and 31 of US20150159173), hu.13 (SEQ ID NO: 16 and 32 of US20150159173), hu.26 (SEQ ID NO: 17 and 33 of US20150159173), hu.37 (SEQ ID NO: 18 and 34 of US20150159173), hu.53 (SEQ ID NO: 19 and 35 of US20150159173), rh.43 (SEQ ID NO: 21 and 37 of US20150159173), rh2 (SEQ ID NO: 39 of US20150159173), rh.37 (SEQ ID NO: 40 of US20150159173), rh.64 (SEQ ID NO: 43 of US20150159173), rh.48 (SEQ ID NO: 44 of US20150159173), ch.5 (SEQ ID NO 46 of US20150159173), rh.67 (SEQ ID NO: 47 of US20150159173), rh.58 (SEQ ID NO: 48 of US20150159173), or variants thereof including, but not limited to Cy5R1, Cy5R2, Cy5R3, Cy5R4, rh.13R, rh.37R2, rh.2R, rh.8R, rh.48.1, rh.48.2, rh.48.1.2, hu.44R1, hu.44R2, hu.44R3, hu.29R, ch.5R1, rh64R1, rh64R2, AAV6.2, AAV6.1, AAV6.12, hu.48R1, hu.48R2, and hu.48R3.

[0434] In some embodiments, the AAV serotype may be, or have, a sequence as described in U.S. Pat. No. 7,198,951, the contents of which are herein incorporated by reference in their entirety, such as, but not limited to, AAV9 (SEQ ID NO: 1-3 of U.S. Pat. No. 7,198,951), AAV2 (SEQ ID NO: 4 of U.S. Pat. No. 7,198,951), AAV1 (SEQ ID NO: 5 of U.S. Pat. No. 7,198,951), AAV3 (SEQ ID NO: 6 of U.S. Pat. No. 7,198,951), and AAV8 (SEQ ID NO: 7 of U.S. Pat. No. 7,198,951).

[0435] In some embodiments, the AAV serotype may be, or have, a mutation in the AAV9 sequence as described by N Pulicherla et al. (Molecular Therapy 19(6):1070-1078 (2011), herein incorporated by reference in its entirety), such as but not limited to, AAV9.9, AAV9.11, AAV9.13, AAV9.16, AAV9.24, AAV9.45, AAV9.47, AAV9.61, AAV9.68, AAV9.84.

[0436] In some embodiments, the AAV serotype may be, or have, a sequence as described in U.S. Pat. No. 6,156,303, the contents of which are herein incorporated by reference in their entirety, such as, but not limited to, AAV3B (SEQ ID NO: 1 and 10 of U.S. Pat. No. 6,156,303), AAV6 (SEQ ID NO: 2, 7 and 11 of U.S. Pat. No. 6,156,303), AAV2 (SEQ ID NO: 3 and 8 of U.S. Pat. No. 6,156,303), AAV3A (SEQ ID NO: 4 and 9, of U.S. Pat. No. 6,156,303), or derivatives thereof.

[0437] In some embodiments, the AAV serotype may be, or have, a sequence as described in United States Publication No. US20140359799, the contents of which are herein incorporated by reference in their entirety, such as, but not limited to, AAV8 (SEQ ID NO: 1 of US20140359799), AAVDJ (SEQ ID NO: 2 and 3 of US20140359799), or variants thereof.

[0438] In some embodiments, the serotype may be AAVDJ or a variant thereof, such as AAVDJ8 (or AAV-DJ8), as described by Grimm et al. (Journal of Virology 82(12): 5887-5911 (2008), herein incorporated by reference in its entirety). The amino acid sequence of AAVDJ8 may comprise two or more mutations in order to remove the heparin binding domain (HBD). As a non-limiting example, the AAV-DJ sequence described as SEQ ID NO: 1 in U.S. Pat. No. 7,588,772, the contents of which are herein incorporated by reference in their entirety, may comprise two mutations: (1) R587Q where arginine (R; Arg) at amino acid 587 is changed to glutamine (Q; Gln) and (2) R590T where arginine (R; Arg) at amino acid 590 is changed to threonine (T; Thr). As another non-limiting example, may comprise three mutations: (1) K406R where lysine (K; Lys) at amino acid 406 is changed to arginine (R; Arg), (2) R587Q where arginine (R; Arg) at amino acid 587 is changed to glutamine (Q; Gln) and (3) R590T where arginine (R; Arg) at amino acid 590 is changed to threonine (T; Thr).

[0439] In some embodiments, the AAV serotype may be, or have, a sequence of AAV4 as described in International Publication No. WO1998011244, the contents of which are herein incorporated by reference in their entirety, such as, but not limited to AAV4 (SEQ ID NO: 1-20 of WO1998011244).

[0440] In some embodiments, the AAV serotype may be, or have, a mutation in the AAV2 sequence to generate AAV2G9 as described in International Publication No. WO2014144229 and herein incorporated by reference in its entirety.

[0441] In some embodiments, the AAV serotype may be, or have, a sequence as described in International Publication No. WO2005033321, the contents of which are herein incorporated by reference in their entirety, such as, but not limited to AAV3-3 (SEQ ID NO: 217 of WO2005033321), AAV1 (SEQ ID NO: 219 and 202 of WO2005033321), AAV106.1/hu.37 (SEQ ID No: 10 of WO2005033321), AAV114.3/hu.40 (SEQ ID No: 11 of WO2005033321), AAV127.2/hu.41 (SEQ ID NO:6 and 8 of WO2005033321), AAV128.3/hu.44 (SEQ ID No: 81 of WO2005033321), AAV130.4/hu.48 (SEQ ID NO: 78 of WO2005033321), AAV145.1/hu.53 (SEQ ID No: 176 and 177 of WO2005033321), AAV145.6/hu.56 (SEQ ID NO: 168 and 192 of WO2005033321), AAV16.12/hu.11 (SEQ ID NO: 153 and 57 of WO2005033321), AAV16.8/hu.10 (SEQ ID NO: 156 and 56 of WO2005033321), AAV161.10/hu.60 (SEQ ID No: 170 of WO2005033321), AAV161.6/hu.61 (SEQ ID No: 174 of WO2005033321), AAV1-7/rh.48 (SEQ ID NO: 32 of WO2005033321), AAV1-8/rh.49 (SEQ ID NOs: 103 and 25 of WO2005033321), AAV2 (SEQ ID NO: 211 and 221 of WO2005033321), AAV2-15/rh.62 (SEQ ID No: 33 and 114 of WO2005033321), AAV2-3/rh.61 (SEQ ID NO: 21 of WO2005033321), AAV2-4/rh.50 (SEQ ID No: 23 and 108 of WO2005033321), AAV2-5/rh.51 (SEQ ID NO: 104 and 22 of WO2005033321), AAV3.1/hu.6 (SEQ ID NO: 5 and 84 of WO2005033321), AAV3.1/hu.9 (SEQ ID NO: 155 and 58 of WO2005033321), AAV3-11/rh.53 (SEQ ID NO: 186 and 176 of WO2005033321), AAV3-3 (SEQ ID NO: 200 of WO2005033321), AAV33.12/hu.17 (SEQ ID NO:4 of WO2005033321), AAV33.4/hu.15 (SEQ ID No: 50 of WO2005033321), AAV33.8/hu.16 (SEQ ID No: 51 of WO2005033321), AAV3-9/rh.52 (SEQ ID NO: 96 and 18 of WO2005033321), AAV4-19/rh.55 (SEQ ID NO: 117 of WO2005033321), AAV4-4 (SEQ ID NO: 201 and 218 of WO2005033321), AAV4-9/rh.54 (SEQ ID NO: 116 of WO2005033321), AAV5 (SEQ ID NO: 199 and 216 of WO2005033321), AAV52.1/hu.20 (SEQ ID NO: 63 of WO2005033321), AAV52/hu.19 (SEQ ID NO: 133 of WO2005033321), AAV5-22/rh.58 (SEQ ID No: 27 of WO2005033321), AAV5-3/rh.57 (SEQ ID NO: 105 of WO2005033321), AAVS-3/rh.57 (SEQ ID No: 26 of WO2005033321), AAV58.2/hu.25 (SEQ ID No: 49 of WO2005033321), AAV6 (SEQ ID NO: 203 and 220 of WO2005033321), AAV7 (SEQ ID NO: 222 and 213 of WO2005033321), AAV7.3/hu.7 (SEQ ID No: 55 of WO2005033321), AAV8 (SEQ ID NO: 223 and 214 of WO2005033321), AAVH-1/hu.1 (SEQ ID No: 46 of WO2005033321), AAVH-5/hu.3 (SEQ ID No: 44 of WO2005033321), AAVhu.1 (SEQ ID NO: 144 of WO2005033321), AAVhu.10 (SEQ ID NO: 156 of WO2005033321), AAVhu.11 (SEQ ID NO: 153 of WO2005033321), AAVhu.12 (WO2005033321 SEQ ID NO: 59), AAVhu.13 (SEQ ID NO: 129 of WO2005033321), AAVhu.14/AAV9 (SEQ ID NO: 123 and 3 of WO2005033321), AAVhu.15 (SEQ ID NO: 147 of WO2005033321), AAVhu.16 (SEQ ID NO: 148 of WO2005033321), AAVhu.17 (SEQ ID NO: 83 of WO2005033321), AAVhu.18 (SEQ ID NO: 149 of WO2005033321), AAVhu.19 (SEQ ID NO: 133 of WO2005033321), AAVhu.2 (SEQ ID NO: 143 of WO2005033321), AAVhu.20 (SEQ ID NO: 134 of WO2005033321), AAVhu.21 (SEQ ID NO: 135 of WO2005033321), AAVhu.22 (SEQ ID NO: 138 of WO2005033321), AAVhu.23.2 (SEQ ID NO: 137 of WO2005033321), AAVhu.24 (SEQ ID NO: 136 of WO2005033321), AAVhu.25 (SEQ ID NO: 146 of WO2005033321), AAVhu.27 (SEQ ID NO: 140 of WO2005033321), AAVhu.29 (SEQ ID NO: 132 of WO2005033321), AAVhu.3 (SEQ ID NO: 145 of WO2005033321), AAVhu.31 (SEQ ID NO: 121 of WO2005033321), AAVhu.32 (SEQ ID NO: 122 of WO2005033321), AAVhu.34 (SEQ ID NO: 125 of WO2005033321), AAVhu.35 (SEQ ID NO: 164 of WO2005033321), AAVhu.37 (SEQ ID NO: 88 of WO2005033321), AAVhu.39 (SEQ ID NO: 102 of WO2005033321), AAVhu.4 (SEQ ID NO: 141 of WO2005033321), AAVhu.40 (SEQ ID NO: 87 of WO2005033321), AAVhu.41 (SEQ ID NO: 91 of WO2005033321), AAVhu.42 (SEQ ID NO: 85 of WO2005033321), AAVhu.43 (SEQ ID NO: 160 of WO2005033321), AAVhu.44 (SEQ ID NO: 144 of WO2005033321), AAVhu.45 (SEQ ID NO: 127 of WO2005033321), AAVhu.46 (SEQ ID NO: 159 of WO2005033321), AAVhu.47 (SEQ ID NO: 128 of WO2005033321), AAVhu.48 (SEQ ID NO: 157 of WO2005033321), AAVhu.49 (SEQ ID NO: 189 of WO2005033321), AAVhu.51 (SEQ ID NO: 190 of WO2005033321), AAVhu.52 (SEQ ID NO: 191 of WO2005033321), AAVhu.53 (SEQ ID NO: 186 of WO2005033321), AAVhu.54 (SEQ ID NO: 188 of WO2005033321), AAVhu.55 (SEQ ID NO: 187 of WO2005033321), AAVhu.56 (SEQ ID NO: 192 of WO2005033321), AAVhu.57 (SEQ ID NO: 193 of WO2005033321), AAVhu.58 (SEQ ID NO: 194 of WO2005033321), AAVhu.6 (SEQ ID NO: 84 of WO2005033321), AAVhu.60 (SEQ ID NO: 184 of WO2005033321), AAVhu.61 (SEQ ID NO: 185 of WO2005033321), AAVhu.63 (SEQ ID NO: 195 of WO2005033321), AAVhu.64 (SEQ ID NO: 196 of WO2005033321), AAVhu.66 (SEQ ID NO: 197 of WO2005033321), AAVhu.67 (SEQ ID NO: 198 of WO2005033321), AAVhu.7 (SEQ ID NO: 150 of WO2005033321), AAVhu.8 (WO2005033321 SEQ ID NO: 12), AAVhu.9 (SEQ ID NO: 155 of WO2005033321), AAVLG-10/rh.40 (SEQ ID No: 14 of WO2005033321), AAVLG-4/rh.38 (SEQ ID NO: 86 of WO2005033321), AAVLG-4/rh.38 (SEQ ID No: 7 of WO2005033321), AAVN721-8/rh.43 (SEQ ID NO: 163 of WO2005033321), AAVN721-8/rh.43 (SEQ ID No: 43 of WO2005033321), AAVpi.1 (WO2005033321 SEQ ID NO: 28), AAVpi.2 (WO2005033321 SEQ ID NO: 30), AAVpi.3 (WO2005033321 SEQ ID NO: 29), AAVrh.38 (SEQ ID NO: 86 of WO2005033321), AAVrh.40 (SEQ ID NO: 92 of WO2005033321), AAVrh.43 (SEQ ID NO: 163 of WO2005033321), AAVrh.44 (WO2005033321 SEQ ID NO: 34), AAVrh.45 (WO2005033321 SEQ ID NO: 41), AAVrh.47 (WO2005033321 SEQ ID NO: 38), AAVrh.48 (SEQ ID NO: 115 of WO2005033321), AAVrh.49 (SEQ ID NO: 103 of WO2005033321), AAVrh.50 (SEQ ID NO: 108 of WO2005033321), AAVrh.51 (SEQ ID NO: 104 of WO2005033321), AAVrh.52 (SEQ ID NO: 96 of WO2005033321), AAVrh.53 (SEQ ID NO: 97 of WO2005033321), AAVrh.55 (WO2005033321 SEQ ID NO: 37), AAVrh.56 (SEQ ID NO: 152 of WO2005033321), AAVrh.57 (SEQ ID NO: 105 of WO2005033321), AAVrh.58 (SEQ ID NO: 106 of WO2005033321), AAVrh.59 (WO2005033321 SEQ ID NO: 42), AAVrh.60 (WO2005033321 SEQ ID NO: 31), AAVrh.61 (SEQ ID NO: 107 of WO2005033321), AAVrh.62 (SEQ ID NO: 114 of WO2005033321), AAVrh.64 (SEQ ID NO: 99 of WO2005033321), AAVrh.65 (WO2005033321 SEQ ID NO: 35), AAVrh.68 (WO2005033321 SEQ ID NO: 16), AAVrh.69 (WO2005033321 SEQ ID NO: 39), AAVrh.70 (WO2005033321 SEQ ID NO: 20), AAVrh.72 (WO2005033321 SEQ ID NO: 9), or variants thereof including, but not limited to, AAVcy.2, AAVcy.3, AAVcy.4, AAVcy.5, AAVcy.6, AAVrh.12, AAVrh.17, AAVrh.18, AAVrh.19, AAVrh.21, AAVrh.22, AAVrh.23, AAVrh.24, AAVrh.25, AAVrh.25/42 15, AAVrh.31, AAVrh.32, AAVrh.33, AAVrh.34, AAVrh.35, AAVrh.36, AAVrh.37, AAVrh14. Non limiting examples of variants include SEQ ID NO: 13, 15, 17, 19, 24, 36, 40, 45, 47, 48, 51-54, 60-62, 64-77, 79, 80, 82, 89, 90, 93-95, 98, 100, 101, 109-113, 118-120, 124, 126, 131, 139, 142, 151,154, 158, 161, 162, 165-183, 202, 204-212, 215, 219, 224-236, of WO2005033321, the contents of which are herein incorporated by reference in their entirety.

[0442] In some embodiments, the AAV serotype may be, or have, a sequence as described in International Publication No. WO2015168666, the contents of which are herein incorporated by reference in their entirety, such as, but not limited to, AAVrh8R (SEQ ID NO: 9 of WO2015168666), AAVrh8R A586R mutant (SEQ ID NO: 10 of WO2015168666), AAVrh8R R533A mutant (SEQ ID NO: 11 of WO2015168666), or variants thereof.

[0443] In some embodiments, the AAV serotype may be, or have, a sequence as described in U.S. Pat. No. 9,233,131, the contents of which are herein incorporated by reference in their entirety, such as, but not limited to, AAVhE1.1 (SEQ ID NO:44 of U.S. Pat. No. 9,233,131), AAVhEr1.5 (SEQ ID NO:45 of U.S. Pat. No. 9,233,131), AAVhER1.14 (SEQ ID NO:46 of U.S. Pat. No. 9,233,131), AAVhEr1.8 (SEQ ID NO:47 of U.S. Pat. No. 9,233,131), AAVhEr1.16 (SEQ ID NO:48 of U.S. Pat. No. 9,233,131), AAVhEr1.18 (SEQ ID NO:49 of U.S. Pat. No. 9,233,131), AAVhEr1.35 (SEQ ID NO:50 of U.S. Pat. No. 9,233,131), AAVhEr1.7 (SEQ ID NO:51 of U.S. Pat. No. 9,233,131), AAVhEr1.36 (SEQ ID NO:52 of U.S. Pat. No. 9,233,131), AAVhEr2.29 (SEQ ID NO:53 of U.S. Pat. No. 9,233,131), AAVhEr2.4 (SEQ ID NO:54 of U.S. Pat. No. 9,233,131), AAVhEr2.16 (SEQ ID NO:55 of U.S. Pat. No. 9,233,131), AAVhEr2.30 (SEQ ID NO:56 of U.S. Pat. No. 9,233,131), AAVhEr2.31 (SEQ ID NO:58 of U.S. Pat. No. 9,233,131), AAVhEr2.36 (SEQ ID NO:57 of U.S. Pat. No. 9,233,131), AAVhER1.23 (SEQ ID NO:53 of U.S. Pat. No. 9,233,131), AAVhEr3.1 (SEQ ID NO:59 of U.S. Pat. No. 9,233,131), AAV2.5T (SEQ ID NO:42 of U.S. Pat. No. 9,233,131), or variants thereof.

[0444] In some embodiments, the AAV serotype may be, or have, a sequence as described in United States Patent Publication No. US20150376607, the contents of which are herein incorporated by reference in their entirety, such as, but not limited to, AAV-PAEC (SEQ ID NO:1 of US20150376607), AAV-LK01 (SEQ ID NO:2 of US20150376607), AAV-LKO2 (SEQ ID NO:3 of US20150376607), AAV-LKO3 (SEQ ID NO:4 of US20150376607), AAV-LKO4 (SEQ ID NO:5 of US20150376607), AAV-LKO5 (SEQ ID NO:6 of US20150376607), AAV-LKO6 (SEQ ID NO:7 of US20150376607), AAV-LKO7 (SEQ ID NO:8 of US20150376607), AAV-LKO8 (SEQ ID NO:9 of US20150376607), AAV-LKO9 (SEQ ID NO:10 of US20150376607), AAV-LK10 (SEQ ID NO:11 of US20150376607), AAV-LK11 (SEQ ID NO:12 of US20150376607), AAV-LK12 (SEQ ID NO:13 of US20150376607), AAV-LK13 (SEQ ID NO:14 of US20150376607), AAV-LK14 (SEQ ID NO:15 of US20150376607), AAV-LK15 (SEQ ID NO:16 of US20150376607), AAV-LK16 (SEQ ID NO:17 of US20150376607), AAV-LK17 (SEQ ID NO:18 of US20150376607), AAV-LK18 (SEQ ID NO:19 of US20150376607), AAV-LK19 (SEQ ID NO:20 of US20150376607), AAV-PAEC2 (SEQ ID NO:21 of US20150376607), AAV-PAEC4 (SEQ ID NO:22 of US20150376607), AAV-PAEC6 (SEQ ID NO:23 of US20150376607), AAV-PAEC7 (SEQ ID NO:24 of US20150376607), AAV-PAEC8 (SEQ ID NO:25 of US20150376607), AAV-PAEC11 (SEQ ID NO:26 of US20150376607), AAV-PAEC12 (SEQ ID NO:27, of US20150376607), or variants thereof.

[0445] In some embodiments, the AAV serotype may be, or have, a sequence as described in U.S. Pat. No. 9,163,261, the contents of which are herein incorporated by reference in their entirety, such as, but not limited to, AAV-2-pre-miRNA-101 (SEQ ID NO: 1 U.S. Pat. No. 9,163,261), or variants thereof.

[0446] In some embodiments, the AAV serotype may be, or have, a sequence as described in United States Patent Publication No. US20150376240, the contents of which are herein incorporated by reference in their entirety, such as, but not limited to, AAV-8h (SEQ ID NO: 6 of US20150376240), AAV-8b (SEQ ID NO: 5 of US20150376240), AAV-h (SEQ ID NO: 2 of US20150376240), AAV-b (SEQ ID NO: 1 of US20150376240), or variants thereof.

[0447] In some embodiments, the AAV serotype may be, or have, a sequence as described in United States Patent Publication No. US20160017295, the contents of which are herein incorporated by reference in their entirety, such as, but not limited to, AAV SM 10-2 (SEQ ID NO: 22 of US20160017295), AAV Shuffle 100-1 (SEQ ID NO: 23 of US20160017295), AAV Shuffle 100-3 (SEQ ID NO: 24 of US20160017295), AAV Shuffle 100-7 (SEQ ID NO: 25 of US20160017295), AAV Shuffle 10-2 (SEQ ID NO: 34 of US20160017295), AAV Shuffle 10-6 (SEQ ID NO: 35 of US20160017295), AAV Shuffle 10-8 (SEQ ID NO: 36 of US20160017295), AAV Shuffle 100-2 (SEQ ID NO: 37 of US20160017295), AAV SM 10-1 (SEQ ID NO: 38 of US20160017295), AAV SM 10-8 (SEQ ID NO: 39 of US20160017295), AAV SM 100-3 (SEQ ID NO: 40 of US20160017295), AAV SM 100-10 (SEQ ID NO: 41 of US20160017295), or variants thereof.

[0448] In some embodiments, the AAV serotype may be, or have, a sequence as described in United States Patent Publication No. US20150238550, the contents of which are herein incorporated by reference in their entirety, such as, but not limited to, BNP61 AAV (SEQ ID NO: 1 of US20150238550), BNP62 AAV (SEQ ID NO: 3 of US20150238550), BNP63 AAV (SEQ ID NO: 4 of US20150238550), or variants thereof.

[0449] In some embodiments, the AAV serotype may be or may have a sequence as described in United States Patent Publication No. US20150315612, the contents of which are herein incorporated by reference in their entirety, such as, but not limited to, AAVrh.50 (SEQ ID NO: 108 of US20150315612), AAVrh.43 (SEQ ID NO: 163 of US20150315612), AAVrh.62 (SEQ ID NO: 114 of US20150315612), AAVrh.48 (SEQ ID NO: 115 of US20150315612), AAVhu.19 (SEQ ID NO: 133 of US20150315612), AAVhu.11 (SEQ ID NO: 153 of US20150315612), AAVhu.53 (SEQ ID NO: 186 of US20150315612), AAV4-8/rh.64 (SEQ ID No: 15 of US20150315612), AAVLG-9/hu.39 (SEQ ID No: 24 of US20150315612), AAV54.5/hu.23 (SEQ ID No: 60 of US20150315612), AAV54.2/hu.22 (SEQ ID No: 67 of US20150315612), AAV54.7/hu.24 (SEQ ID No: 66 of US20150315612), AAV54.1/hu.21 (SEQ ID No: 65 of US20150315612), AAV54.4R/hu.27 (SEQ ID No: 64 of US20150315612), AAV46.2/hu.28 (SEQ ID No: 68 of US20150315612), AAV46.6/hu.29 (SEQ ID No: 69 of US20150315612), AAV128.1/hu.43 (SEQ ID No: 80 of US20150315612), or variants thereof.

[0450] In some embodiments, the AAV serotype may be, or have, a sequence as described in International Publication No. WO2015121501, the contents of which are herein incorporated by reference in their entirety, such as, but not limited to, true type AAV (ttAAV) (SEQ ID NO: 2 of WO2015121501), “UPenn AAV10” (SEQ ID NO: 8 of WO2015121501), “Japanese AAV10” (SEQ ID NO: 9 of WO2015121501), or variants thereof.

[0451] According to the present disclosure, AAV capsid serotype selection or use may be from a variety of species. In some embodiments, the AAV may be an avian AAV (AAAV). The AAAV serotype may be, or have, a sequence as described in U.S. Pat. No. 9,238,800, the contents of which are herein incorporated by reference in their entirety, such as, but not limited to, AAAV (SEQ ID NO: 1, 2, 4, 6, 8, 10, 12, and 14 of U.S. Pat. No. 9,238,800), or variants thereof.

[0452] In some embodiments, the AAV may be a bovine AAV (BAAV). The BAAV serotype may be, or have, a sequence as described in U.S. Pat. No. 9,193,769, the contents of which are herein incorporated by reference in their entirety, such as, but not limited to, BAAV (SEQ ID NO: 1 and 6 of U.S. Pat. No. 9,193,769), or variants thereof. The BAAV serotype may be or have a sequence as described in U.S. Pat. No. 7,427,396, the contents of which are herein incorporated by reference in their entirety, such as, but not limited to, BAAV (SEQ ID NO: 5 and 6 of U.S. Pat. No. 7,427,396), or variants thereof.

[0453] In some embodiments, the AAV may be a caprine AAV. The caprine AAV serotype may be, or have, a sequence as described in U.S. Pat. No. 7,427,396, the contents of which are herein incorporated by reference in their entirety, such as, but not limited to, caprine AAV (SEQ ID NO: 3 of U.S. Pat. No. 7,427,396), or variants thereof.

[0454] In other embodiments the AAV may be engineered as a hybrid AAV from two or more parental serotypes. In some embodiments, the AAV may be AAV2G9 which comprises sequences from AAV2 and AAV9. The AAV2G9 AAV serotype may be, or have, a sequence as described in United States Patent Publication No. US20160017005, the contents of which are herein incorporated by reference in their entirety.

[0455] In some embodiments, the AAV may be a serotype generated by the AAV9 capsid library with mutations in amino acids 390-627 (VP1 numbering) as described by Pulicherla et al. (Molecular Therapy 19(6):1070-1078 (2011), the contents of which are herein incorporated by reference in their entirety. The serotype and corresponding nucleotide and amino acid substitutions may be, but is not limited to, AAV9.1 (G1594C; D532H), AAV6.2 (T1418A and T1436X; V473D and I479K), AAV9.3 (T1238A; F413Y), AAV9.4 (T1250C and A1617T; F417S), AAV9.5 (A1235G, A1314T, A1642G, C1760T; Q412R, T548A, A587V), AAV9.6 (T1231A; F411I), AAV9.9 (G1203A, G1785T; W595C), AAV9.10 (A1500G, T1676C; M559T), AAV9.11 (A1425T, A1702C, A1769T; T568P, Q590L), AAV9.13 (A1369C, A1720T; N457H, T574S), AAV9.14 (T1340A, T1362C, T1560C, G1713A; L447H), AAV9.16 (A1775T; Q592L), AAV9.24 (T1507C, T1521G; W503R), AAV9.26 (A1337G, A1769C; Y446C, Q590P), AAV9.33 (A1667C; D556A), AAV9.34 (A1534G, C1794T; N512D), AAV9.35 (A1289T, T1450A, C1494T, A1515T, C1794A, G1816A; Q430L, Y484N, N98K, V6061), AAV9.40 (A1694T, E565V), AAV9.41 (A1348T, T1362C; T450S), AAV9.44 (A1684C, A1701T, A1737G; N562H, K567N), AAV9.45 (A1492T, C1804T; N498Y, L602F), AAV9.46 (G1441C, T1525C, T1549G; G481R, W509R, L517V), 9.47 (G1241A, G1358A, A1669G, C1745T; S414N, G453D, K557E, T582I), AAV9.48 (C1445T, A1736T; P482L, Q579L), AAV9.50 (A1638T, C1683T, T1805A; Q546H, L602H), AAV9.53 (G1301A, A1405C, C1664T, G1811T; R134Q, S469R, A555V, G604V), AAV9.54 (C1531A, T1609A; L511I, L537M), AAV9.55 (T1605A; F535L), AAV9.58 (C1475T, C1579A; T492I, H527N), AAV.59 (T1336C; Y446H), AAV9.61 (A1493T; N498I), AAV9.64 (C1531A, A1617T; L511I), AAV9.65 (C1335T, T1530C, C1568A; A523D), AAV9.68 (C1510A; P504T), AAV9.80 (G1441A; G481R), AAV9.83 (C1402A, A1500T; P468T, E500D), AAV9.87 (T1464C, T1468C; S490P), AAV9.90 (A1196T; Y399F), AAV9.91 (T1316G, A1583T, C1782G, T1806C; L439R, K528I), AAV9.93 (A1273G, A1421G, A1638C, C1712T, G1732A, A1744T, A1832T; S425G, Q474R, Q546H, P571L, G578R, T582S, D611V), AAV9.94 (A1675T; M559L) and AAV9.95 (T1605A; F535L).

[0456] In some embodiments, the AAV serotype may be, or have, a sequence as described in International Publication No. WO2016049230, the contents of which are herein incorporated by reference in their entirety, such as, but not limited to AAVF1/HSC1 (SEQ ID NO: 2 and 20 of WO2016049230), AAVF2/HSC2 (SEQ ID NO: 3 and 21 of WO2016049230), AAVF3/HSC3 (SEQ ID NO: 5 and 22 of WO2016049230), AAVF4/HSC4 (SEQ ID NO: 6 and 23 of WO2016049230), AAVF5/HSC5 (SEQ ID NO: 11 and 25 of WO2016049230), AAVF6/HSC6 (SEQ ID NO: 7 and 24 of WO2016049230), AAVF7/HSC7 (SEQ ID NO: 8 and 27 of WO2016049230), AAVF8/HSC8 (SEQ ID NO: 9 and 28 of WO2016049230), AAVF9/HSC9 (SEQ ID NO: 10 and 29 of WO2016049230), AAVF11/HSC11 (SEQ ID NO: 4 and 26 of WO2016049230), AAVF12/HSC12 (SEQ ID NO: 12 and 30 of WO2016049230), AAVF13/HSC13 (SEQ ID NO: 14 and 31 of WO2016049230), AAVF14/HSC14 (SEQ ID NO: 15 and 32 of WO2016049230), AAVF15/HSC15 (SEQ ID NO: 16 and 33 of WO2016049230), AAVF16/HSC16 (SEQ ID NO: 17 and 34 of WO2016049230), AAVF17/HSC17 (SEQ ID NO: 13 and 35 of WO2016049230), or variants or derivatives thereof.

[0457] In some embodiments, the AAV serotype may be, or have, a sequence as described in U.S. Pat. No. 8,734,809, the contents of which are herein incorporated by reference in their entirety, such as, but not limited to, AAV CBr-E1 (SEQ ID NO: 13 and 87 of U.S. Pat. No. 8,734,809), AAV CBr-E2 (SEQ ID NO: 14 and 88 of U.S. Pat. No. 8,734,809), AAV CBr-E3 (SEQ ID NO: 15 and 89 of U.S. Pat. No. 8,734,809), AAV CBr-E4 (SEQ ID NO: 16 and 90 of U.S. Pat. No. 8,734,809), AAV CBr-E5 (SEQ ID NO: 17 and 91 of U.S. Pat. No. 8,734,809), AAV CBr-e5 (SEQ ID NO: 18 and 92 of U.S. Pat. No. 8,734,809), AAV CBr-E6 (SEQ ID NO: 19 and 93 of U.S. Pat. No. 8,734,809), AAV CBr-E7 (SEQ ID NO: 20 and 94 of U.S. Pat. No. 8,734,809), AAV CBr-E8 (SEQ ID NO: 21 and 95 of U.S. Pat. No. 8,734,809), AAV CLv-D1 (SEQ ID NO: 22 and 96 of U.S. Pat. No. 8,734,809), AAV CLv-D2 (SEQ ID NO: 23 and 97 of U.S. Pat. No. 8,734,809), AAV CLv-D3 (SEQ ID NO: 24 and 98 of U.S. Pat. No. 8,734,809), AAV CLv-D4 (SEQ ID NO: 25 and 99 of U.S. Pat. No. 8,734,809), AAV CLv-D5 (SEQ ID NO: 26 and 100 of U.S. Pat. No. 8,734,809), AAV CLv-D6 (SEQ ID NO: 27 and 101 of U.S. Pat. No. 8,734,809), AAV CLv-D7 (SEQ ID NO: 28 and 102 of U.S. Pat. No. 8,734,809), AAV CLv-D8 (SEQ ID NO: 29 and 103 of U.S. Pat. No. 8,734,809), AAV CLv-E1 (SEQ ID NO: 13 and 87 of U.S. Pat. No. 8,734,809), AAV CLv-R1 (SEQ ID NO: 30 and 104 of U.S. Pat. No. 8,734,809), AAV CLv-R2 (SEQ ID NO: 31 and 105 of U.S. Pat. No. 8,734,809), AAV CLv-R3 (SEQ ID NO: 32 and 106 of U.S. Pat. No. 8,734,809), AAV CLv-R4 (SEQ ID NO: 33 and 107 of U.S. Pat. No. 8,734,809), AAV CLv-R5 (SEQ ID NO: 34 and 108 of U.S. Pat. No. 8,734,809), AAV CLv-R6 (SEQ ID NO: 35 and 109 of U.S. Pat. No. 8,734,809), AAV CLv-R7 (SEQ ID NO: 36 and 110 of U.S. Pat. No. 8,734,809), AAV CLv-R8 (SEQ ID NO: X and X of U.S. Pat. No. 8,734,809), AAV CLv-R9 (SEQ ID NO: X and X of U.S. Pat. No. 8,734,809), AAV CLg-F1 (SEQ ID NO: 39 and 113 of U.S. Pat. No. 8,734,809), AAV CLg-F2 (SEQ ID NO: 40 and 114 of U.S. Pat. No. 8,734,809), AAV CLg-F3 (SEQ ID NO: 41 and 115 of U.S. Pat. No. 8,734,809), AAV CLg-F4 (SEQ ID NO: 42 and 116 of U.S. Pat. No. 8,734,809), AAV CLg-F5 (SEQ ID NO: 43 and 117 of U.S. Pat. No. 8,734,809), AAV CLg-F6 (SEQ ID NO: 43 and 117 of U.S. Pat. No. 8,734,809), AAV CLg-F7 (SEQ ID NO: 44 and 118 of U.S. Pat. No. 8,734,809), AAV CLg-F8 (SEQ ID NO: 43 and 117 of U.S. Pat. No. 8,734,809), AAV CSp-1 (SEQ ID NO: 45 and 119 of U.S. Pat. No. 8,734,809), AAV CSp-10 (SEQ ID NO: 46 and 120 of U.S. Pat. No. 8,734,809), AAV CSp-11 (SEQ ID NO: 47 and 121 of U.S. Pat. No. 8,734,809), AAV CSp-2 (SEQ ID NO: 48 and 122 of U.S. Pat. No. 8,734,809), AAV CSp-3 (SEQ ID NO: 49 and 123 of U.S. Pat. No. 8,734,809), AAV CSp-4 (SEQ ID NO: 50 and 124 of U.S. Pat. No. 8,734,809), AAV CSp-6 (SEQ ID NO: 51 and 125 of U.S. Pat. No. 8,734,809), AAV CSp-7 (SEQ ID NO: 52 and 126 of U.S. Pat. No. 8,734,809), AAV CSp-8 (SEQ ID NO: 53 and 127 of U.S. Pat. No. 8,734,809), AAV CSp-9 (SEQ ID NO: 54 and 128 of U.S. Pat. No. 8,734,809), AAV CHt-2 (SEQ ID NO: 55 and 129 of U.S. Pat. No. 8,734,809), AAV CHt-3 (SEQ ID NO: 56 and 130 of U.S. Pat. No. 8,734,809), AAV CKd-1 (SEQ ID NO: 57 and 131 of U.S. Pat. No. 8,734,809), AAV CKd-10 (SEQ ID NO: 58 and 132 of U.S. Pat. No. 8,734,809), AAV CKd-2 (SEQ ID NO: 59 and 133 of U.S. Pat. No. 8,734,809), AAV CKd-3 (SEQ ID NO: 60 and 134 of U.S. Pat. No. 8,734,809), AAV CKd-4 (SEQ ID NO: 61 and 135 of U.S. Pat. No. 8,734,809), AAV CKd-6 (SEQ ID NO: 62 and 136 of U.S. Pat. No. 8,734,809), AAV CKd-7 (SEQ ID NO: 63 and 137 of U.S. Pat. No. 8,734,809), AAV CKd-8 (SEQ ID NO: 64 and 138 of U.S. Pat. No. 8,734,809), AAV CLv-1 (SEQ ID NO: 35 and 139 of U.S. Pat. No. 8,734,809), AAV CLv-12 (SEQ ID NO: 66 and 140 of U.S. Pat. No. 8,734,809), AAV CLv-13 (SEQ ID NO: 67 and 141 of U.S. Pat. No. 8,734,809), AAV CLv-2 (SEQ ID NO: 68 and 142 of U.S. Pat. No. 8,734,809), AAV CLv-3 (SEQ ID NO: 69 and 143 of U.S. Pat. No. 8,734,809), AAV CLv-4 (SEQ ID NO: 70 and 144 of U.S. Pat. No. 8,734,809), AAV CLv-6 (SEQ ID NO: 71 and 145 of U.S. Pat. No. 8,734,809), AAV CLv-8 (SEQ ID NO: 72 and 146 of U.S. Pat. No. 8,734,809), AAV CKd-B1 (SEQ ID NO: 73 and 147 of U.S. Pat. No. 8,734,809), AAV CKd-B2 (SEQ ID NO: 74 and 148 of U.S. Pat. No. 8,734,809), AAV CKd-B3 (SEQ ID NO: 75 and 149 of U.S. Pat. No. 8,734,809), AAV CKd-B4 (SEQ ID NO: 76 and 150 of U.S. Pat. No. 8,734,809), AAV CKd-B5 (SEQ ID NO: 77 and 151 of U.S. Pat. No. 8,734,809), AAV CKd-B6 (SEQ ID NO: 78 and 152 of U.S. Pat. No. 8,734,809), AAV CKd-B7 (SEQ ID NO: 79 and 153 of U.S. Pat. No. 8,734,809), AAV CKd-B8 (SEQ ID NO: 80 and 154 of U.S. Pat. No. 8,734,809), AAV CKd-H1 (SEQ ID NO: 81 and 155 of U.S. Pat. No. 8,734,809), AAV CKd-H2 (SEQ ID NO: 82 and 156 of U.S. Pat. No. 8,734,809), AAV CKd-H3 (SEQ ID NO: 83 and 157 of U.S. Pat. No. 8,734,809), AAV CKd-H4 (SEQ ID NO: 84 and 158 of U.S. Pat. No. 8,734,809), AAV CKd-H5 (SEQ ID NO: 85 and 159 of U.S. Pat. No. 8,734,809), AAV CKd-H6 (SEQ ID NO: 77 and 151 of U.S. Pat. No. 8,734,809), AAV CHt-1 (SEQ ID NO: 86 and 160 of U.S. Pat. No. 8,734,809), AAV CLv1-1 (SEQ ID NO: 171 of U.S. Pat. No. 8,734,809), AAV CLv1-2 (SEQ ID NO: 172 of U.S. Pat. No. 8,734,809), AAV CLv1-3 (SEQ ID NO: 173 of U.S. Pat. No. 8,734,809), AAV CLv1-4 (SEQ ID NO: 174 of U.S. Pat. No. 8,734,809), AAV Clv1-7 (SEQ ID NO: 175 of U.S. Pat. No. 8,734,809), AAV Clv1-8 (SEQ ID NO: 176 of U.S. Pat. No. 8,734,809), AAV Clv1-9 (SEQ ID NO: 177 of U.S. Pat. No. 8,734,809), AAV Clv1-10 (SEQ ID NO: 178 of U.S. Pat. No. 8,734,809), AAV.VR-355 (SEQ ID NO: 181 of U.S. Pat. No. 8,734,809), AAV.hu.48R3 (SEQ ID NO: 183 of U.S. Pat. No. 8,734,809), or variants or derivatives thereof.

[0458] In some embodiments, the AAV serotype may be, or have, a sequence as described in International Publication No. WO2016065001, the contents of which are herein incorporated by reference in their entirety, such as, but not limited to AAV CHt-P2 (SEQ ID NO: 1 and 51 of WO2016065001), AAV CHt-P5 (SEQ ID NO: 2 and 52 of WO2016065001), AAV CHt-P9 (SEQ ID NO: 3 and 53 of WO2016065001), AAV CBr-7.1 (SEQ ID NO: 4 and 54 of WO2016065001), AAV CBr-7.2 (SEQ ID NO: 5 and 55 of WO2016065001), AAV CBr-7.3 (SEQ ID NO: 6 and 56 of WO2016065001), AAV CBr-7.4 (SEQ ID NO: 7 and 57 of WO2016065001), AAV CBr-7.5 (SEQ ID NO: 8 and 58 of WO2016065001), AAV CBr-7.7 (SEQ ID NO: 9 and 59 of WO2016065001), AAV CBr-7.8 (SEQ ID NO: 10 and 60 of WO2016065001), AAV CBr-7.10 (SEQ ID NO: 11 and 61 of WO2016065001), AAV CKd-N3 (SEQ ID NO: 12 and 62 of WO2016065001), AAV CKd-N4 (SEQ ID NO: 13 and 63 of WO2016065001), AAV CKd-N9 (SEQ ID NO: 14 and 64 of WO2016065001), AAV CLv-L4 (SEQ ID NO: 15 and 65 of WO2016065001), AAV CLv-L5 (SEQ ID NO: 16 and 66 of WO2016065001), AAV CLv-L6 (SEQ ID NO: 17 and 67 of WO2016065001), AAV CLv-K1 (SEQ ID NO: 18 and 68 of WO2016065001), AAV CLv-K3 (SEQ ID NO: 19 and 69 of WO2016065001), AAV CLv-K6 (SEQ ID NO: 20 and 70 of WO2016065001), AAV CLv-M1 (SEQ ID NO: 21 and 71 of WO2016065001), AAV CLv-M11 (SEQ ID NO: 22 and 72 of WO2016065001), AAV CLv-M2 (SEQ ID NO: 23 and 73 of WO2016065001), AAV CLv-M5 (SEQ ID NO: 24 and 74 of WO2016065001), AAV CLv-M6 (SEQ ID NO: 25 and 75 of WO2016065001), AAV CLv-M7 (SEQ ID NO: 26 and 76 of WO2016065001), AAV CLv-M8 (SEQ ID NO: 27 and 77 of WO2016065001), AAV CLv-M9 (SEQ ID NO: 28 and 78 of WO2016065001), AAV CHt-P1 (SEQ ID NO: 29 and 79 of WO2016065001), AAV CHt-P6 (SEQ ID NO: 30 and 80 of WO2016065001), AAV CHt-P8 (SEQ ID NO: 31 and 81 of WO2016065001), AAV CHt-6.1 (SEQ ID NO: 32 and 82 of WO2016065001), AAV CHt-6.10 (SEQ ID NO: 33 and 83 of WO2016065001), AAV CHt-6.5 (SEQ ID NO: 34 and 84 of WO2016065001), AAV CHt-6.6 (SEQ ID NO: 35 and 85 of WO2016065001), AAV CHt-6.7 (SEQ ID NO: 36 and 86 of WO2016065001), AAV CHt-6.8 (SEQ ID NO: 37 and 87 of WO2016065001), AAV CSp-8.10 (SEQ ID NO: 38 and 88 of WO2016065001), AAV CSp-8.2 (SEQ ID NO: 39 and 89 of WO2016065001), AAV CSp-8.4 (SEQ ID NO: 40 and 90 of WO2016065001), AAV CSp-8.5 (SEQ ID NO: 41 and 91 of WO2016065001), AAV CSp-8.6 (SEQ ID NO: 42 and 92 of WO2016065001), AAV CSp-8.7 (SEQ ID NO: 43 and 93 of WO2016065001), AAV CSp-8.8 (SEQ ID NO: 44 and 94 of WO2016065001), AAV CSp-8.9 (SEQ ID NO: 45 and 95 of WO2016065001), AAV CBr-B7.3 (SEQ ID NO: 46 and 96 of WO2016065001), AAV CBr-B7.4 (SEQ ID NO: 47 and 97 of WO2016065001), AAV3B (SEQ ID NO: 48 and 98 of WO2016065001), AAV4 (SEQ ID NO: 49 and 99 of WO2016065001), AAV5 (SEQ ID NO: 50 and 100 of WO2016065001), or variants or derivatives thereof.

[0459] In some embodiments, the AAV particle may have, or may be a serotype selected from any of those found in Table 1.

[0460] In some embodiments, the AAV capsid may comprise a sequence, fragment or variant thereof, of any of the sequences in Table 1.

[0461] In some embodiments, the AAV capsid may be encoded by a sequence, fragment or variant as described in Table 1.

[0462] In any of the DNA and RNA sequences referenced and/or described herein, the single letter symbol has the following description: A for adenine; C for cytosine; G for guanine; T for thymine; U for Uracil; W for weak bases such as adenine or thymine; S for strong nucleotides such as cytosine and guanine; M for amino nucleotides such as adenine and cytosine; K for keto nucleotides such as guanine and thymine; R for purines adenine and guanine; Y for pyrimidine cytosine and thymine; B for any base that is not A (e.g., cytosine, guanine, and thymine); D for any base that is not C (e.g., adenine, guanine, and thymine); H for any base that is not G (e.g., adenine, cytosine, and thymine); V for any base that is not T (e.g., adenine, cytosine, and guanine); N for any nucleotide (which is not a gap); and Z is for zero.

[0463] In any of the amino acid sequences referenced and/or described herein, the single letter symbol has the following description: G (Gly) for Glycine; A (Ala) for Alanine; L (Leu) for Leucine; M (Met) for Methionine; F (Phe) for Phenylalanine; W (Trp) for Tryptophan; K (Lys) for Lysine; Q (Gln) for Glutamine; E (Glu) for Glutamic Acid; S (Ser) for Serine; P (Pro) for Proline; V (Val) for Valine; I (Ile) for Isoleucine; C (Cys) for Cysteine; Y (Tyr) for Tyrosine; H (His) for Histidine; R (Arg) for Arginine; N (Asn) for Asparagine; D (Asp) for Aspartic Acid; T (Thr) for Threonine; B (Asx) for Aspartic acid or Asparagine; J (Xle) for Leucine or Isoleucine; O (Pyl) for Pyrrolysine; U (Sec) for Selenocysteine; X (Xaa) for any amino acid; and Z (Glx) for Glutamine or Glutamic acid.

TABLE 1
AAV Serotypes

| Serotype | SEQ ID NO: | Reference Information |
|---|---|---|
| VOY101 | 1 | — |
| VOY101 | 2 | — |
| VOY201 | 3 | — |
| PHP.N/PHP.B-DGT | 4 | WO2017100671 SEQ ID NO: 46 |
| AAVPHP.B or G2B-26 | 5 | WO2015038958 SEQ ID NO: 8 and 13 |
| AAVPHP.B | 6 | WO2015038958 SEQ ID NO: 9 |
| AAVG2B-13 | 7 | WO2015038958 SEQ ID NO: 12 |
| AAVTH1.1-32 | 8 | WO2015038958 SEQ ID NO: 14 |
| AAVTH1.1-35 | 9 | WO2015038958 SEQ ID NO: 15 |
| PHP.S/G2A12 | 10 | WO2017100671 SEQ ID NO: 47 |
| AAV9/hu.14 K449R | 11 | WO2017100671 SEQ ID NO: 45 |
| AAV1 | 12 | US20150159173 SEQ ID NO: 11, |
| | | US20150315612 SEQ ID NO: 202 |
| AAV1 | 13 | US20160017295 SEQ ID NO: 1, |
| | | US20030138772 SEQ ID NO: 64, |
| | | US20150159173 SEQ ID NO: 27, |
| | | US20150315612 SEQ ID NO: 219, |
| | | U.S. Pat. No. 7,198,951 SEQ ID NO: 5 |
| AAV1 | 14 | US20030138772 SEQ ID NO: 6 |
| AAV1.3 | 15 | US20030138772 SEQ ID NO: 14 |
| AAV10 | 16 | US20030138772 SEQ ID NO: 117 |
| AAV10 | 17 | WO2015121501 SEQ ID NO: 9 |
| AAV10 | 18 | WO2015121501 SEQ ID NO: 8 |
| AAV11 | 19 | US20030138772 SEQ ID NO: 118 |
| AAV12 | 20 | US20030138772 SEQ ID NO: 119 |
| AAV2 | 21 | US20150159173 SEQ ID NO: 7, |
| | | US20150315612 SEQ ID NO: 211 |
| AAV2 | 22 | US20030138772 SEQ ID NO: 70, |
| | | US20150159173 SEQ ID NO: 23, |
| | | US20150315612 SEQ ID NO: 221, US20160017295 |
| | | SEQ ID NO: 2, U.S. Pat. No. 6,156,303 |
| | | SEQ ID NO: 4, U.S. Pat. No. 7,198,951 |
| | | SEQ ID NO: 4, WO2015121501 SEQ ID NO: 1 |
| AAV2 | 23 | U.S. Pat. No. 6,156,303 SEQ ID NO: 8 |
| AAV2 | 24 | US20030138772 SEQ ID NO: 7 |
| AAV2 | 25 | U.S. Pat. No. 6,156,303 SEQ ID NO: 3 |
| AAV2.5T | 26 | U.S. Pat. No. 9,233,131 SEQ ID NO: 42 |
| AAV223.10 | 27 | US20030138772 SEQ ID NO: 75 |
| AAV223.2 | 28 | US20030138772 SEQ ID NO: 49 |
| AAV223.2 | 29 | US20030138772 SEQ ID NO: 76 |
| AAV223.4 | 30 | US20030138772 SEQ ID NO: 50 |
| AAV223.4 | 31 | US20030138772 SEQ ID NO: 73 |
| AAV223.5 | 32 | US20030138772 SEQ ID NO: 51 |
| AAV223.5 | 33 | US20030138772 SEQ ID NO: 74 |
| AAV223.6 | 34 | US20030138772 SEQ ID NO: 52 |
| AAV223.6 | 35 | US20030138772 SEQ ID NO: 78 |
| AAV223.7 | 36 | US20030138772 SEQ ID NO: 53 |
| AAV223.7 | 37 | US20030138772 SEQ ID NO: 77 |
| AAV29.3 | 38 | US20030138772 SEQ ID NO: 82 |
| AAV29.4 | 39 | US20030138772 SEQ ID NO: 12 |
| AAV29.5 | 40 | US20030138772 SEQ ID NO: 83 |
| AAV29.5 (AAVbb.2) | 41 | US20030138772 SEQ ID NO: 13 |
| AAV3 | 42 | US20150159173 SEQ ID NO: 12 |
| AAV3 | 43 | US20030138772 SEQ ID NO: 71, |
| | | US20150159173 SEQ ID NO: 28, |
| | | US20160017295 SEQ ID NO: 3, |
| | | U.S. Pat. No. 7,198,951 SEQ ID NO. 6 |
| AAV3 | 44 | US20030138772 SEQ ID NO: 8 |
| AAV3.3b | 45 | US20030138772 SEQ ID NO: 72 |
| AAV3-3 | 46 | US20150315612 SEQ ID NO: 200 |
| AAV3-3 | 47 | US20150315612 SEQ ID NO: 217 |
| AAV3a | 48 | U.S. Pat. No. 6,156,303 SEQ ID NO: 5 |
| AAV3a | 49 | U.S. Pat. No. 6,156,303 SEQ ID NO: 9 |
| AAV3b | 50 | U.S. Pat. No. 6,156,303 SEQ ID NO: 6 |
| AAV3b | 51 | U.S. Pat. No. 6,156,303 SEQ ID NO: 10 |
| AAV3b | 52 | U.S. Pat. No. 6,156,303 SEQ ID NO: 1 |
| AAV4 | 53 | US20140348794 SEQ ID NO: 17 |
| AAV4 | 54 | US20140348794 SEQ ID NO: 5 |
| AAV4 | 55 | US20140348794 SEQ ID NO: 3 |
| AAV4 | 56 | US20140348794 SEQ ID NO: 14 |
| AAV4 | 57 | US20140348794 SEQ ID NO: 15 |
| AAV4 | 58 | US20140348794 SEQ ID NO: 19 |
| AAV4 | 59 | US20140348794 SEQ ID NO: 12 |
| AAV4 | 60 | US20140348794 SEQ ID NO: 13 |
| AAV4 | 61 | US20140348794 SEQ ID NO: 7 |
| AAV4 | 62 | US20140348794 SEQ ID NO: 8 |
| AAV4 | 63 | US20140348794 SEQ ID NO: 9 |
| AAV4 | 64 | US20140348794 SEQ ID NO: 2 |
| AAV4 | 65 | US20140348794 SEQ ID NO: 10 |
| AAV4 | 66 | US20140348794 SEQ ID NO. 11 |
| AAV4 | 67 | US20140348794 SEQ ID NO: 18 |
| AAV4 | 68 | US20030138772 SEQ ID NO: 63, |
| | | US20160017295 SEQ ID NO: 4, |
| | | US20140348794 SEQ ID NO: 4 |
| AAV4 | 69 | US20140348794 SEQ ID NO: 16 |
| AAV4 | 70 | US20140348794 SEQ ID NO: 20 |
| AAV4 | 71 | US20140348794 SEQ ID NO: 6 |
| AAV4 | 72 | US20140348794 SEQ ID NO: 1 |
| AAV42.2 | 73 | US20030138772 SEQ ID NO: 9 |
| AAV42.2 | 74 | US20030138772 SEQ ID NO: 102 |
| AAV42.3b | 75 | US20030138772 SEQ ID NO: 36 |
| AAV42.3B | 76 | US20030138772 SEQ ID NO: 107 |
| AAV42.4 | 77 | US20030138772 SEQ ID NO: 33 |
| AAV42.4 | 78 | US20030138772 SEQ ID NO: 88 |
| AAV42.8 | 79 | US20030138772 SEQ ID NO: 27 |
| AAV42.8 | 80 | US20030138772 SEQ ID NO: 85 |
| AAV43.1 | 81 | US20030138772 SEQ ID NO: 39 |
| AAV43.1 | 82 | US20030138772 SEQ ID NO: 92 |
| AAV43.12 | 83 | US20030138772 SEQ ID NO: 41 |
| AAV43.12 | 84 | US20030138772 SEQ ID NO: 93 |
| AAV43.20 | 85 | US20030138772 SEQ ID NO: 42 |
| AAV43.20 | 86 | US20030138772 SEQ ID NO. 99 |
| AAV43.21 | 87 | US20030138772 SEQ ID NO: 43 |
| AAV43.21 | 88 | US20030138772 SEQ ID NO: 96 |
| AAV43.23 | 89 | US20030138772 SEQ ID NO: 44 |
| AAV43.23 | 90 | US20030138772 SEQ ID NO: 98 |
| AAV43.25 | 91 | US20030138772 SEQ ID NO: 45 |
| AAV43.25 | 92 | US20030138772 SEQ ID NO: 97 |
| AAV43.5 | 93 | US20030138772 SEQ ID NO: 40 |
| AAV43.5 | 94 | US20030138772 SEQ ID NO: 94 |
| AAV4-4 | 95 | US20150315612 SEQ ID NO: 201 |
| AAV4-4 | 96 | US20150315612 SEQ ID NO: 218 |
| AAV44.1 | 97 | US20030138772 SEQ ID NO: 46 |
| AAV44.1 | 98 | US20030138772 SEQ ID NO: 79 |
| AAV44.5 | 99 | US20030138772 SEQ ID NO: 47 |
| AAV44.5 | 100 | US20030138772 SEQ ID NO: 80 |
| AAV4407 | 101 | US20150315612 SEQ ID NO: 90 |
| AAV5 | 102 | U.S. Pat. No. 7,427,396 SEQ ID NO: 1 |
| AAV5 | 103 | US20030138772 SEQ ID NO: 114 |
| AAV5 | 104 | US20160017295 SEQ ID NO: 5, |
| | | U.S. Pat. No. 7,427,396 SEQ ID NO: 2, |
| | | US20150315612 SEQ ID NO: 216 |
| AAV5 | 105 | US20150315612 SEQ ID NO: 199 |
| AAV6 | 106 | US20150159173 SEQ ID NO: 13 |
| AAV6 | 107 | US20030138772 SEQ ID NO: 65, |
| | | US20150159173 SEQ ID NO: 29, |
| | | US20160017295 SEQ ID NO: 6, |
| | | U.S. Pat. No. 6,156,303 SEQ ID NO: 7 |
| AAV6 | 108 | U.S. Pat. No. 6,156,303 SEQ ID NO: 11 |
| AAV6 | 109 | U.S. Pat. No. 6,156,303 SEQ ID NO: 2 |
| AAV6 | 110 | US20150315612 SEQ ID NO: 203 |
| AAV6 | 111 | US20150315612 SEQ ID NO: 220 |
| AAV6.1 | 112 | US20150159173 |
| AAV6.12 | 113 | US20150159173 |
| AAV6.2 | 114 | US20150159173 |
| AAV7 | 115 | US20150159173 SEQ ID NO: 14 |
| AAV7 | 116 | US20150315612 SEQ ID NO: 183 |
| AAV7 | 117 | US20030138772 SEQ ID NO: 2, |
| | | US20150159I73 SEQ ID NO: 30, |
| | | US20150315612 SEQ ID NO: 181, |
| | | US20160017295 SEQ ID NO: 7 |
| AAV7 | 118 | US20030138772 SEQ ID NO: 3 |
| AAV7 | 119 | US20030138772 SEQ ID NO: 1, |
| | | US20150315612 SEQ ID NO: 180 |
| AAV7 | 120 | US20150315612 SEQ ID NO: 213 |
| AAV7 | 121 | US20150315612 SEQ ID NO: 222 |
| AAV8 | 122 | US20150159173 SEQ ID NO: 15 |
| AAV8 | 123 | US20150376240 SEQ ID NO: 7 |
| AAV8 | 124 | US20030138772 SEQ ID NO: 4, |
| | | US20150315612 SEQ ID NO: 182 |
| AAV8 | 125 | US20030138772 SEQ ID NO: 95, |
| | | US20140359799 SEQ ID NO: 1, |
| | | US20150159173 SEQ ID NO: 31, |
| | | US20160017295 SEQ ID NO: 8, |
| | | U.S. Pat. No. 7,198,951 SEQ ID NO: 7, |
| | | US20150315612 SEQ ID NO: 223 |
| AAV8 | 126 | US20150376240 SEQ ID NO: 8 |
| AAV8 | 127 | US20150315612 SEQ ID NO: 214 |
| AAV-8b | 128 | US20150376240 SEQ ID NO: 5 |
| AAV-8b | 129 | US20150376240 SEQ ID NO: 3 |
| AAV-8h | 130 | US20150376240 SEQ ID NO: 6 |
| AAV-8h | 131 | US20150376240 SEQ ID NO: 4 |
| AAV9 | 132 | US20030138772 SEQ ID NO: 5 |
| AAV9 | 133 | U.S. Pat. No. 7,198,951 SEQ ID NO: 1 |
| AAV9 | 134 | US20160017295 SEQ ID NO: 9 |
| AAV9 | 135 | US20030138772 SEQ ID NO: 100, |
| | | U.S. Pat. No. 7,198,951 SEQ ID NO: 2 |
| AAV9 | 136 | U.S. Pat. No. 7,198,951 SEQ ID NO: 3 |
| AAV9 (AAVhu.14) | 137 | U.S. Pat. No. 7,906,111 SEQ ID NO: 3; |
| | | WO2015038958 SEQ ID NO: 11 |
| AAV9 (AAVhu.l4) | 138 | U.S. Pat. No. 7,906,111 SEQ ID NO: 123; |
| | | WO2015038958 SEQ ID NO: 2 |
| AAVA3.1 | 139 | US20030138772 SEQ ID NO: 120 |
| AAVA3.3 | 140 | US20030138772 SEQ ID NO: 57 |
| AAVA3.3 | 141 | US20030138772 SEQ ID NO: 66 |
| AAVA3.4 | 142 | US20030138772 SEQ ID NO: 54 |
| AAVA3.4 | 143 | US20030138772 SEQ ID NO: 68 |
| AAVA3.5 | 144 | US20030138772 SEQ ID NO: 55 |
| AAVA3.5 | 145 | US20030138772 SEQ ID NO: 69 |
| AAVA3.7 | 146 | US20030138772 SEQ ID NO: 56 |
| AAVA3.7 | 147 | US20030138772 SEQ ID NO: 67 |
| AAV29.3 (AAVbb.1) | 148 | US20030138772 SEQ ID NO: 11 |
| AAVC2 | 149 | US20030138772 SEQ ID NO: 61 |
| AAVCh.5 | 150 | US20150159173 SEQ ID NO: 46, |
| | | US20150315612 SEQ ID NO: 234 |
| AAVcy.2 (AAV13.3) | 151 | US20030138772 SEQ ID NO: 15 |
| AAV24.1 | 152 | US20030138772 SEQ ID NO: 101 |
| AAVcy.3 (AAV24.1) | 153 | US20030138772 SEQ ID NO: 16 |
| AAV27.3 | 154 | US20030138772 SEQ ID NO: 104 |
| AAVcy.4 (AAV27.3) | 155 | US20030138772 SEQ ID NO: 17 |
| AAVcy.5 | 156 | US20150315612 SEQ ID NO: 227 |
| AAV7.2 | 157 | US20030138772 SEQ ID NO: 103 |
| AAVcy.5 (AAV7.2) | 158 | US20030138772 SEQ ID NO: 18 |
| AAV16.3 | 159 | US20030138772 SEQ ID NO: 105 |
| AAVcy.6 (AAV16.3) | 160 | US20030138772 SEQ ID NO: 10 |
| AAVcy.5 | 161 | US20150159173 SEQ ID NO: 8 |
| AAVcy.5 | 162 | US20150159173 SEQ ID NO: 24 |
| AAVCy.5R1 | 163 | US20150159173 |
| AAVCy.5R2 | 164 | US20150159173 |
| AAVCy.5R3 | 165 | US20150159173 |
| AAVCy.5R4 | 166 | US20150159173 |
| AAVDJ | 167 | US20140359799 SEQ ID NO: 3, |
| | | U.S. Pat. No. 7,588,772 SEQ ID NO: 2 |
| AAVDJ | 168 | US20140359799 SEQ ID NO: 2, |
| | | U.S. Pat. No. 7,588,772 SEQ ID NO: 1 |
| AAVDJ-8 | 169 | U.S. Pat. No. 7,588,772; Grimm et al 2008 |
| AAVDJ-8 | 170 | U.S. Pat. No. 7,588,772; Grimm et al 2008 |
| AAVF5 | 171 | US20030138772 SEQ ID NO: 110 |
| AAVH2 | 172 | US20030138772 SEQ ID NO: 26 |
| AAVH6 | 173 | US20030138772 SEQ ID NO: 25 |
| AAVhE1.1 | 174 | U.S. Pat. No. 9,233,131 SEQ ID NO: 44 |
| AAVhEr1.14 | 175 | U.S. Pat. No. 9,233,131 SEQ ID NO: 46 |
| AAVhEr1.16 | 176 | U.S. Pat. No. 9,233,131 SEQ ID NO: 48 |
| AAVhEr1.18 | 177 | U.S. Pat. No. 9,233,131 SEQ ID NO: 49 |
| AAVhEr1.23 (AAVhEr2.29) | 178 | U.S. Pat. No. 9,233,131 SEQ ID NO: 53 |
| AAVhEr1.35 | 179 | U.S. Pat. No. 9,233,131 SEQ ID NO: 50 |
| AAVhEr1.36 | 180 | U.S. Pat. No. 9,233,131 SEQ ID NO: 52 |
| AAVhEr1.5 | 181 | U.S. Pat. No. 9,233,131 SEQ ID NO: 45 |
| AAVhEr1.7 | 182 | U.S. Pat. No. 9,233,131 SEQ ID NO: 51 |
| AAVhEr1.8 | 183 | U.S. Pat. No. 9,233,131 SEQ ID NO: 47 |
| AAVhEr2.16 | 184 | U.S. Pat. No. 9,233,131 SEQ ID NO: 55 |
| AAVhEr2.30 | 185 | U.S. Pat. No. 9,233,131 SEQ ID NO: 56 |
| AAVhEr2.31 | 186 | U.S. Pat. No. 9,233,131 SEQ ID NO: 58 |
| AAVhEr2.36 | 187 | U.S. Pat. No. 9,233,131 SEQ ID NO: 57 |
| AAVhEr2.4 | 188 | U.S. Pat. No. 9,233,131 SEQ ID NO: 54 |
| AAVhEr3.1 | 189 | U.S. Pat. No. 9,233,131 SEQ ID NO: 59 |
| AAVhu.1 | 190 | US20150315612 SEQ ID NO: 46 |
| AAVhu.1 | 191 | US20150315612 SEQ ID NO: 144 |
| AAVhu.10 (AAV16.8) | 192 | US20150315612 SEQ ID NO: 56 |
| AAVhu.10 (AAV16.8) | 193 | US20150315612 SEQ ID NO: 156 |
| AAVhu.11 (AAV16.12) | 194 | US20150315612 SEQ ID NO: 57 |
| AAVhu.11 (AAV16.12) | 195 | US20150315612 SEQ ID NO: 153 |
| AAVhu.12 | 196 | US20150315612 SEQ ID NO: 59 |
| AAVhu.12 | 197 | US20150315612 SEQ ID NO: 154 |
| AAVhu.13 | 198 | US20150159173 SEQ ID NO: 16, |
| | | US20150315612 SEQ ID NO: 71 |
| AAVhu.13 | 199 | US20150159173 SEQ ID NO: 32, |
| | | US20150315612 SEQ ID NO: 129 |
| AAVhu.136.1 | 200 | US20150315612 SEQ ID NO: 165 |
| AAVhu.140.1 | 201 | US20150315612 SEQ ID NO: 166 |
| AAVhu.140.2 | 202 | US20150315612 SEQ ID NO: 167 |
| AAVhu.145.6 | 203 | US20150315612 SEQ ID No: 178 |
| AAVhu.15 | 204 | US20150315612 SEQ ID NO: 147 |
| AAVhu.15 (AAV33.4) | 205 | US20150315612 SEQ ID NO: 50 |
| AAVhu.156.1 | 206 | US20150315612 SEQ ID No: 179 |
| AAVhu.16 | 207 | US20150315612 SEQ ID NO: 148 |
| AAVhu.16 (AAV33.8) | 208 | US20150315612 SEQ ID NO: 51 |
| AAVhu.17 | 209 | US20150315612 SEQ ID NO: 83 |
| AAVhu.17 (AAV33.12) | 210 | US20150315612 SEQ ID NO: 4 |
| AAVhu.172.1 | 211 | US20150315612 SEQ ID NO: 171 |
| AAVhu.172.2 | 212 | US20150315612 SEQ ID NO: 172 |
| AAVhu.173.4 | 213 | US20150315612 SEQ ID NO: 173 |
| AAVhu.173.8 | 214 | US20150315612 SEQ ID NO: 175 |
| AAVhu.18 | 215 | US20150315612 SEQ ID NO: 52 |
| AAVhu.18 | 216 | US20150315612 SEQ ID NO: 149 |
| AAVhu.19 | 217 | US20150315612 SEQ ID NO: 62 |
| AAVhu.19 | 218 | US20150315612 SEQ ID NO: 133 |
| AAVhu.2 | 219 | US20150315612 SEQ ID NO: 48 |
| AAVhu.2 | 220 | US20150315612 SEQ ID NO: 143 |
| AAVhu.20 | 221 | US20150315612 SEQ ID NO: 63 |
| AAVhu.20 | 222 | US20150315612 SEQ ID NO: 134 |
| AAVhu.21 | 223 | US20150315612 SEQ ID NO: 65 |
| AAVhu.21 | 224 | US20150315612 SEQ ID NO: 135 |
| AAVhu.22 | 225 | US20150315612 SEQ ID NO: 67 |
| AAVhu.22 | 226 | US20150315612 SEQ ID NO: 138 |
| AAVhu.23 | 227 | US20150315612 SEQ ID NO: 60 |
| AAVhu.23.2 | 228 | US20150315612 SEQ ID NO: 137 |
| AAVhu.24 | 229 | US20150315612 SEQ ID NO: 66 |
| AAVhu.24 | 230 | US20150315612 SEQ ID NO: 136 |
| AAVhu.25 | 231 | US20150315612 SEQ ID NO: 49 |
| AAVhu.25 | 232 | US20150315612 SEQ ID NO: 146 |
| AAVhu.26 | 233 | US20150159173 SEQ ID NO: 17, |
| | | US20150315612 SEQ ID NO: 61 |
| AAVhu.26 | 234 | US20150159173 SEQ ID NO: 33, |
| | | US20150315612 SEQ ID NO: 139 |
| AAVhu.27 | 235 | US20150315612 SEQ ID NO: 64 |
| AAVhu.27 | 236 | US20150315612 SEQ ID NO: 140 |
| AAVhu.28 | 237 | US20150315612 SEQ ID NO: 68 |
| AAVhu.28 | 238 | US20150315612 SEQ ID NO: 130 |
| AAVhu.29 | 239 | US20150315612 SEQ ID NO: 69 |
| AAVhu.29 | 240 | US20150159173 SEQ ID NO: 42, |
| | | US20150315612 SEQ ID NO: 132 |
| AAVhu.29 | 241 | US20150315612 SEQ ID NO: 225 |
| AAVhu.29R | 242 | US20150159173 |
| AAVhu.3 | 243 | US20150315612 SEQ ID NO: 44 |
| AAVhu.3 | 244 | US20150315612 SEQ ID NO: 145 |
| AAVhu.30 | 245 | US20150315612 SEQ ID NO: 70 |
| AAVhu.30 | 246 | US20150315612 SEQ ID NO: 131 |
| AAVhu.31 | 247 | US20150315612 SEQ ID NO: 1 |
| AAVhu.31 | 248 | US20150315612 SEQ ID NO: 121 |
| AAVhu.32 | 249 | US20150315612 SEQ ID NO: 2 |
| AAVhu.32 | 250 | US20150315612 SEQ ID NO: 122 |
| AAVhu.33 | 251 | US20150315612 SEQ ID NO: 75 |
| AAVhu.33 | 252 | US20150315612 SEQ ID NO: 124 |
| AAVhu.34 | 253 | US20150315612 SEQ ID NO: 72 |
| AAVhu.34 | 254 | US20150315612 SEQ ID NO: 125 |
| AAVhu.35 | 255 | US20150315612 SEQ ID NO: 73 |
| AAVhu.35 | 256 | US20150315612 SEQ ID NO: 164 |
| AAVhu.36 | 257 | US20150315612 SEQ ID NO: 74 |
| AAVhu.36 | 258 | US20150315612 SEQ ID NO: 126 |
| AAVhu.37 | 259 | US20150159173 SEQ ID NO: 34, |
| | | US20150315612 SEQ ID NO: 88 |
| AAVhu.37 (AAV106.1) | 260 | US20150315612 SEQ ID NO: 10, |
| | | US20150159173 SEQ ID NO: 18 |
| AAVhu.38 | 261 | US20150315612 SEQ ID NO: 161 |
| AAVhu.39 | 262 | US20150315612 SEQ ID NO: 102 |
| AAVhu.39 (AAVLG-9) | 263 | US20150315612 SEQ ID NO: 24 |
| AAVhu.4 | 264 | US20150315612 SEQ ID NO: 47 |
| AAVhu.4 | 265 | US20150315612 SEQ ID NO: 141 |
| AAVhu.40 | 266 | US20150315612 SEQ ID NO: 87 |
| AAVhu.40 (AAV114.3) | 267 | US20150315612 SEQ ID No: 11 |
| AAVhu.41 | 268 | US20150315612 SEQ ID NO: 91 |
| AAVhu.41 (AAV127.2) | 269 | US20150315612 SEQ ID NO: 6 |
| AAVhu.42 | 270 | US20150315612 SEQ ID NO: 85 |
| AAVhu.42 (AAV127.5) | 271 | US20150315612 SEQ ID NO: 8 |
| AAVhu.43 | 272 | US20150315612 SEQ ID NO: 160 |
| AAVhu.43 | 273 | US20150315612 SEQ ID NO: 236 |
| AAVhu.43 (AAV128.1) | 274 | US20150315612 SEQ ID NO: 80 |
| AAVhu.44 | 275 | US20150159173 SEQ ID NO: 45, |
| | | US20150315612 SEQ ID NO: 158 |
| AAVhu.44 (AAV128.3) | 276 | US20150315612 SEQ ID NO: 81 |
| AAVhu.44R1 | 277 | US20150159173 |
| AAVhu.44R2 | 278 | US20150159173 |
| AAVhu.44R3 | 279 | US20150159173 |
| AAVhu.45 | 280 | US20150315612 SEQ ID NO: 76 |
| AAVhu.45 | 281 | US20150315612 SEQ ID NO: 127 |
| AAVhu.46 | 282 | US20150315612 SEQ ID NO: 82 |
| AAVhu.46 | 283 | US20150315612 SEQ ID NO: 159 |
| AAVhu.46 | 284 | US20150315612 SEQ ID NO: 224 |
| AAVhu.47 | 285 | US20150315612 SEQ ID NO: 77 |
| AAVhu.47 | 286 | US20150315612 SEQ ID NO: 128 |
| AAVhu.48 | 287 | US20150159173 SEQ ID NO: 38 |
| AAVhu.48 | 288 | US20150315612 SEQ ID NO: 157 |
| AAVhu.48 (AAV130.4) | 289 | US20150315612 SEQ ID NO: 78 |
| AAVhu.48R1 | 290 | US20150159173 |
| AAVhu.48R2 | 291 | US20150159173 |
| AAVhu.48R3 | 292 | US20150159173 |
| AAVhu.49 | 293 | US20150315612 SEQ ID NO: 209 |
| AAVhu.49 | 294 | US20150315612 SEQ ID NO: 189 |
| AAVhu.5 | 295 | US20150315612 SEQ ID NO: 45 |
| AAVhu.5 | 296 | US20150315612 SEQ ID NO: 142 |
| AAVhu.51 | 297 | US20150315612 SEQ ID NO: 208 |
| AAVhu.51 | 298 | US20150315612 SEQ ID NO: 190 |
| AAVhu.52 | 299 | US20150315612 SEQ ID NO: 210 |
| AAVhu.52 | 300 | US20150315612 SEQ ID NO: 191 |
| AAVhu.53 | 301 | US20150159173 SEQ ID NO: 19 |
| AAVhu.53 | 302 | US20150159173 SEQ ID NO: 35 |
| AAVhu.53 (AAV145.1) | 303 | US20150315612 SEQ ID NO: 176 |
| AAVhu.54 | 304 | US20150315612 SEQ ID NO: 188 |
| AAVhu.54 (AAV145.5) | 305 | US20150315612 SEQ ID No: 177 |
| AAVhu.55 | 306 | US20150315612 SEQ ID NO: 187 |
| AAVhu.56 | 307 | US20150315612 SEQ ID NO: 205 |
| AAVhu.56 (AAV145.6) | 308 | US20150315612 SEQ ID NO: 168 |
| AAVhu.56 (AAV145.6) | 309 | US20150315612 SEQ ID NO: 192 |
| AAVhu.57 | 310 | US20150315612 SEQ ID NO: 206 |
| AAVhu.57 | 311 | US20150315612 SEQ ID NO: 169 |
| AAVhu.57 | 312 | US20150315612 SEQ ID NO: 193 |
| AAVhu.58 | 313 | US20150315612 SEQ ID NO: 207 |
| AAVhu.58 | 314 | US201503I5612 SEQ ID NO: 194 |
| AAVhu.6 (AAV3.1) | 315 | US20150315612 SEQ ID NO: 5 |
| AAVhu.6 (AAV3.1) | 316 | US20150315612 SEQ ID NO: 84 |
| AAVhu.60 | 317 | US20150315612 SEQ ID NO: 184 |
| AAVhu.60 (AAV161.10) | 318 | US20150315612 SEQ ID NO: 170 |
| AAVhu.61 | 319 | US20150315612 SEQ ID NO: 185 |
| AAVhu.61 (AAV161.6) | 320 | US20150315612 SEQ ID NO: 174 |
| AAVhu.63 | 321 | US20150315612 SEQ ID NO: 204 |
| AAVhu.63 | 322 | US20150315612 SEQ ID NO: 195 |
| AAVhu.64 | 323 | US20150315612 SEQ ID NO: 212 |
| AAVhu.64 | 324 | US20150315612 SEQ ID NO: 196 |
| AAVhu.66 | 325 | US20150315612 SEQ ID NO: 197 |
| AAVhu.67 | 326 | US20150315612 SEQ ID NO: 215 |
| AAVhu.67 | 327 | US20150315612 SEQ ID NO: 198 |
| AAVhu.7 | 328 | US20150315612 SEQ ID NO: 226 |
| AAVhu.7 | 329 | US20150315612 SEQ ID NO: 150 |
| AAVhu.7 (AAV7.3) | 330 | US20150315612 SEQ ID NO: 55 |
| AAVhu.71 | 331 | US20150315612 SEQ ID NO: 79 |
| AAVhu.8 | 332 | US20150315612 SEQ ID NO: 53 |
| AAVhu.8 | 333 | US20150315612 SEQ ID NO: 12 |
| AAVhu.8 | 334 | US20150315612 SEQ ID NO: 151 |
| AAVhu.9 (AAV3.1) | 335 | US20150315612 SEQ ID NO: 58 |
| AAVhu.9 (AAV3.1) | 336 | US20150315612 SEQ ID NO: 155 |
| AAV-LK01 | 337 | US20150376607 SEQ ID NO: 2 |
| AAV-LK01 | 338 | US20150376607 SEQ ID NO: 29 |
| AAV-LK02 | 339 | US20150376607 SEQ ID NO: 3 |
| AAV-LK02 | 340 | US20150376607 SEQ ID NO: 30 |
| AAV-LK03 | 341 | US20150376607 SEQ ID NO: 4 |
| AAV-LK03 | 342 | WO2015121501 SEQ ID NO: 12, |
| | | US20150376607 SEQ ID NO: 31 |
| AAV-LK04 | 343 | US20150376607 SEQ ID NO: 5 |
| AAV-LK04 | 344 | US20150376607 SEQ ID NO: 32 |
| AAV-LK05 | 345 | US20150376607 SEQ ID NO: 6 |
| AAV-LK05 | 346 | US20150376607 SEQ ID NO: 33 |
| AAV-LK06 | 347 | US20150376607 SEQ ID NO: 7 |
| AAV-LK06 | 348 | US20150376607 SEQ ID NO: 34 |
| AAV-LK07 | 349 | US20150376607 SEQ ID NO: 8 |
| AAV-LK07 | 350 | US20150376607 SEQ ID NO: 35 |
| AAV-LK08 | 351 | US20150376607 SEQ ID NO: 9 |
| AAV-LK08 | 352 | US20150376607 SEQ ID NO: 36 |
| AAV-LK09 | 353 | US20150376607 SEQ ID NO: 10 |
| AAV-LK09 | 354 | US20150376607 SEQ ID NO: 37 |
| AAV-LK10 | 355 | US20150376607 SEQ ID NO: 11 |
| AAV-LK10 | 356 | US20150376607 SEQ ID NO: 38 |
| AAV-LK11 | 357 | US20150376607 SEQ ID NO: 12 |
| AAV-LK11 | 358 | US20150376607 SEQ ID NO: 39 |
| AAV-LK12 | 359 | US20150376607 SEQ ID NO: 13 |
| AAV-LK12 | 360 | US20150376607 SEQ ID NO: 40 |
| AAV-LK13 | 361 | US20150376607 SEQ ID NO: 14 |
| AAV-LK13 | 362 | US20150376607 SEQ ID NO: 41 |
| AAV-LK14 | 363 | US20150376607 SEQ ID NO: 15 |
| AAV-LK14 | 364 | US20150376607 SEQ ID NO: 42 |
| AAV-LK15 | 365 | US20150376607 SEQ ID NO: 16 |
| AAV-LK15 | 366 | US20150376607 SEQ ID NO: 43 |
| AAV-LK16 | 367 | US20150376607 SEQ ID NO: 17 |
| AAV-LK16 | 368 | US20150376607 SEQ ID NO: 44 |
| AAV-LK17 | 369 | US20150376607 SEQ ID NO: 18 |
| AAV-LK17 | 370 | US20150376607 SEQ ID NO: 45 |
| AAV-LK18 | 371 | US20150376607 SEQ ID NO: 19 |
| AAV-LK18 | 372 | US20150376607 SEQ ID NO: 46 |
| AAV-LK19 | 373 | US20150376607 SEQ ID NO: 20 |
| AAV-LK19 | 374 | US20150376607 SEQ ID NO: 47 |
| AAV-PAEC | 375 | US20150376607 SEQ ID NO: 1 |
| AAV-PAEC | 376 | US20150376607 SEQ ID NO: 48 |
| AAV-PAEC11 | 377 | US20150376607 SEQ ID NO: 26 |
| AAV-PAEC11 | 378 | US20150376607 SEQ ID NO: 54 |
| AAV-PAEC12 | 379 | US20150376607 SEQ ID NO: 27 |
| AAV-PAEC12 | 380 | US20150376607 SEQ ID NO: 51 |
| AAV-PAEC13 | 381 | US20150376607 SEQ ID NO: 28 |
| AAV-PAEC13 | 382 | US20150376607 SEQ ID NO: 49 |
| AAV-PAEC2 | 383 | US20150376607 SEQ ID NO: 21 |
| AAV-PAEC2 | 384 | US20150376607 SEQ ID NO: 56 |
| AAV-PAEC4 | 385 | US20150376607 SEQ ID NO: 22 |
| AAV-PAEC4 | 386 | US20150376607 SEQ ID NO: 55 |
| AAV-PAEC6 | 387 | US20150376607 SEQ ID NO: 23 |
| AAV-PAEC6 | 388 | US20150376607 SEQ ID NO: 52 |
| AAV-PAEC7 | 389 | US20150376607 SEQ ID NO: 24 |
| AAV-PAEC7 | 390 | US20150376607 SEQ ID NO: 53 |
| AAV-PAEC8 | 391 | US20150376607 SEQ ID NO: 25 |
| AAV-PAEC8 | 392 | US20150376607 SEQ ID NO: 50 |
| AAVpi.1 | 393 | US20150315612 SEQ ID NO: 28 |
| AAVpi.1 | 394 | US20150315612 SEQ ID NO: 93 |
| AAVpi.2 | 395 | US20150315612 SEQ ID NO: 30 |
| AAVpi.2 | 396 | US20150315612 SEQ ID NO: 95 |
| AAVpi.3 | 397 | US20150315612 SEQ ID NO: 29 |
| AAVpi.3 | 398 | US20150315612 SEQ ID NO: 94 |
| AAVrh.10 | 399 | US20150159173 SEQ ID NO: 9 |
| AAVrh.10 | 400 | US20150159173 SEQ ID NO: 25 |
| AAV44.2 | 401 | US20030138772 SEQ ID NO: 59 |
| AAVrh.10 (AAV44.2) | 402 | US20030138772 SEQ ID NO: 81 |
| AAV42.1B | 403 | US20030138772 SEQ ID NO: 90 |
| AAVrh.12 (AAV42.1b) | 404 | US20030138772 SEQ ID NO: 30 |
| AAVrh.13 | 405 | US20150159173 SEQ ID NO: 10 |
| AAVrh.13 | 406 | US20150159173 SEQ ID NO: 26 |
| AAVrh.13 | 407 | US20150315612 SEQ ID NO: 228 |
| AAVrh.13R | 408 | US20150159173 |
| AAV42.3A | 409 | US20030138772 SEQ ID NO: 87 |
| AAVrh.14 (AAV42.3a) | 410 | US20030138772 SEQ ID NO: 32 |
| AAV42.5A | 411 | US20030138772 SEQ ID NO: 89 |
| AAVrh.17 (AAV42.5a) | 412 | US20030138772 SEQ ID NO: 34 |
| AAV42.5B | 413 | US20030138772 SEQ ID NO: 91 |
| AAVrh.18 (AAV42.5b) | 414 | US20030138772 SEQ ID NO: 29 |
| AAV42.6B | 415 | US20030138772 SEQ ID NO: 112 |
| AAVrh.19 (AAV42.6b) | 416 | US20030138772 SEQ ID NO: 38 |
| AAVrh.2 | 417 | US20150159173 SEQ ID NO: 39 |
| AAVrh.2 | 418 | US20150315612 SEQ ID NO: 231 |
| AAVrh.20 | 419 | US20150159173 SEQ ID NO: 1 |
| AAV42.10 | 420 | US20030138772 SEQ ID NO: 106 |
| AAVrh.21 (AAV42.10) | 421 | US20030138772 SEQ ID NO: 35 |
| AAV42.11 | 422 | US20030138772 SEQ ID NO: 108 |
| AAVrh.22 (AAV42.11) | 423 | US20030138772 SEQ ID NO: 37 |
| AAV42.12 | 424 | US20030138772 SEQ ID NO: 113 |
| AAVrh.23 (AAV42.12) | 425 | US20030138772 SEQ ID NO: 58 |
| AAV42.13 | 426 | US20030138772 SEQ ID NO: 86 |
| AAVrh.24 (AAV42.13) | 427 | US20030138772 SEQ ID NO: 31 |
| AAV42.15 | 428 | US20030138772 SEQ ID NO: 84 |
| AAVrh.25 (AAV42.15) | 429 | US20030138772 SEQ ID NO: 28 |
| AAVrh.2R | 430 | US20150159173 |
| AAVrh.31 (AAV223.1) | 431 | US20030138772 SEQ ID NO: 48 |
| AAVC1 | 432 | US20030138772 SEQ ID NO: 60 |
| AAVrh.32 (AAVC1) | 433 | US20030138772 SEQ ID NO: 19 |
| AAVrh.32/33 | 434 | US20150159173 SEQ ID NO: 2 |
| AAVrh.33 (AAVC3) | 435 | US20030138772 SEQ ID NO: 20 |
| AAVC5 | 436 | US20030138772 SEQ ID NO: 62 |
| AAVrh.34 (AAVC5) | 437 | US20030138772 SEQ ID NO: 21 |
| AAVF1 | 438 | US20030138772 SEQ ID NO: 109 |
| AAVrh.35 (AAVF1) | 439 | US20030138772 SEQ ID NO: 22 |
| AAVF3 | 440 | US20030138772 SEQ ID NO: 111 |
| AAVrh.36 (AAVF3) | 441 | US20030138772 SEQ ID NO: 23 |
| AAVrh.37 | 442 | US20030I38772 SEQ ID NO: 24 |
| AAVrh.37 | 443 | US20150159173 SEQ ID NO: 40 |
| AAVrh.37 | 444 | US20150315612 SEQ ID NO: 229 |
| AAVrh.37R2 | 445 | US20150159173 |
| AAVrh.38 (AAVLG-4) | 446 | US20150315612 SEQ ID NO: 7 |
| AAVrh.38 (AAVLG-4) | 447 | US20150315612 SEQ ID NO: 86 |
| AAVrh.39 | 448 | US20150159173 SEQ ID NO: 20, |
| | | US20150315612 SEQ ID NO: 13 |
| AAVrh.39 | 449 | US20150159173 SEQ ID NO: 3, |
| | | US20150159173 SEQ ID NO: 36, |
| | | US20150315612 SEQ ID NO: 89 |
| AAVrh.40 | 450 | US20150315612 SEQ ID NO: 92 |
| AAVrh.40 (AAVLG-10) | 451 | US20150315612 SEQ ID NO: 14 |
| AAVrh.43 (AAVN721-8) | 452 | US20150315612 SEQ ID NO: 43, |
| | | US20150159173 SEQ ID NO: 21 |
| AAVrh.43 (AAVN721-8) | 453 | US20150315612 SEQ ID NO: 163, |
| | | US20150159173 SEQ ID NO: 37 |
| AAVrh.44 | 454 | US20150315612 SEQ ID NO: 34 |
| AAVrh.44 | 455 | US20150315612 SEQ ID NO: 111 |
| AAVrh.45 | 456 | US20150315612 SEQ ID NO: 41 |
| AAVrh.45 | 457 | US20150315612 SEQ ID NO: 109 |
| AAVrh.46 | 458 | US20150159173 SEQ ID NO: 22, |
| | | US20150315612 SEQ ID NO: 19 |
| AAVrh.46 | 459 | US20150159173 SEQ ID NO: 4, |
| | | US20150315612 SEQ ID NO: 101 |
| AAVrh.47 | 460 | US20150315612 SEQ ID NO: 38 |
| AAVrh.47 | 461 | US201503156I2 SEQ ID NO: 118 |
| AAVrh.48 | 462 | US20150159173 SEQ ID NO: 44, |
| | | US20150315612 SEQ ID NO: 115 |
| AAVrh.48.1 | 463 | US20150159173 |
| AAVrh.48.1.2 | 464 | US20150159173 |
| AAVrh.48.2 | 465 | US20150159173 |
| AAVrh.48 (AAV1-7) | 466 | US20150315612 SEQ ID NO: 32 |
| AAVrh.49 (AAV1-8) | 467 | US20150315612 SEQ ID NO: 25 |
| AAVrh.49 (AAV1-8) | 468 | US20150315612 SEQ ID NO: 103 |
| AAVrh.50 (AAV2-4) | 469 | US20150315612 SEQ ID NO: 23 |
| AAVrh.50 (AAV2-4) | 470 | US20150315612 SEQ ID NO: 108 |
| AAVrh.51 (AAV2-5) | 471 | US20150315612 SEQ ID No: 22 |
| AAVrh.51 (AAV2-5) | 472 | US20150315612 SEQ ID NO: 104 |
| AAVrh.52 (AAV3-9) | 473 | US20150315612 SEQ ID NO: 18 |
| AAVrh.52 (AAV3-9) | 474 | US20150315612 SEQ ID NO: 96 |
| AAVrh.53 | 475 | US20150315612 SEQ ID NO: 97 |
| AAVrh.53 (AAV3-11) | 476 | US20150315612 SEQ ID NO: 17 |
| AAVrh.53 (AAV3-11) | 477 | US20150315612 SEQ ID NO: 186 |
| AAVrh.54 | 478 | US20150315612 SEQ ID NO: 40 |
| AAVrh.54 | 479 | US20150159173 SEQ ID NO: 49, |
| | | US20150315612 SEQ ID NO: 116 |
| AAVrh.55 | 480 | US20150315612 SEQ ID NO: 37 |
| AAVrh.55 (AAV4-19) | 481 | US20150315612 SEQ ID NO: 117 |
| AAVrh.56 | 482 | US20150315612 SEQ ID NO: 54 |
| AAVrh.56 | 483 | US20150315612 SEQ ID NO: 152 |
| AAVrh.57 | 484 | US20150315612 SEQ ID NO: 26 |
| AAVrh.57 | 485 | US2015031.5612 SEQ ID NO: 105 |
| AAVrh.58 | 486 | US20150315612 SEQ ID NO: 27 |
| AAVrh.58 | 487 | US20150159173 SEQ ID NO: 48, |
| | | US20150315612 SEQ ID NO: 106 |
| AAVrh.58 | 488 | US20150315612 SEQ ID NO: 232 |
| AAVrh.59 | 489 | US20150315612 SEQ ID NO: 42 |
| AAVrh.59 | 490 | US20150315612 SEQ ID NO: 110 |
| AAVrh.60 | 491 | US20150315612 SEQ ID NO: 31 |
| AAVrh.60 | 492 | US20150315612 SEQ ID NO: 120 |
| AAVrh.61 | 493 | US20150315612 SEQ ID NO: 107 |
| AAVrh.61 (AAV2-3) | 494 | US20150315612 SEQ ID NO: 21 |
| AAVrh.62 (AAV2-15) | 495 | US20150315612 SEQ ID No: 33 |
| AAVrh.62 (AAV2-15) | 496 | US20150315612 SEQ ID NO: 114 |
| AAVrh.64 | 497 | US20150315612 SEQ ID No: 15 |
| AAVrh.64 | 498 | US20150159173 SEQ ID NO: 43, |
| | | US20150315612 SEQ ID NO: 99 |
| AAVrh.64 | 499 | US20150315612 SEQ ID NO: 233 |
| AAVRh.64R1 | 500 | US20150159173 |
| AAVRh.64R2 | 501 | US20150159173 |
| AAVrh.65 | 502 | US20150315612 SEQ ID NO: 35 |
| AAVrh.65 | 503 | US20150315612 SEQ ID NO: 112 |
| AAVrh.67 | 504 | US20150315612 SEQ ID NO: 36 |
| AAVrh.67 | 505 | US20150315612 SEQ ID NO: 230 |
| AAVrh.67 | 506 | US20150159173 SEQ ID NO: 47, |
| | | US20150315612 SEQ ID NO: 113 |
| AAVrh.68 | 507 | US20150315612 SEQ ID NO: 16 |
| AAVrh.68 | 508 | US20150315612 SEQ ID NO: 100 |
| AAVrh.69 | 509 | US20150315612 SEQ ID NO: 39 |
| AAVrh.69 | 510 | US20150315612 SEQ ID NO: 119 |
| AAVrh.70 | 511 | US20150315612 SEQ ID NO: 20 |
| AAVrh.70 | 512 | US20150315612 SEQ ID NO: 98 |
| AAVrh.71 | 513 | US20150315612 SEQ ID NO: 162 |
| AAVrh.72 | 514 | US20150315612 SEQ ID NO: 9 |
| AAVrh.73 | 515 | US20150159I73 SEQ ID NO: 5 |
| AAVrh.74 | 516 | US20150159173 SEQ ID NO: 6 |
| AAVrh.8 | 517 | US20150159173 SEQ ID NO: 41 |
| AAVrh.8 | 518 | US20150315612 SEQ ID NO: 235 |
| AAVrh.8R | 519 | US20150159173, WO2015168666 SEQ ID NO: 9 |
| AAVrh.8R A586R mutant | 520 | WO2015168666 SEQ ID NO: 10 |
| AAVrh.8R R533A mutant | 521 | WO2015168666 SEQ ID NO: 11 |
| BAAV (bovine AAV) | 522 | U.S. Pat. No. 9,193,769 SEQ ID NO: 8 |
| BAAV (bovine AAV) | 523 | U.S. Pat. No. 9,193,769 SEQ ID NO: 10 |
| BAAV (bovine AAV) | 524 | U.S. Pat. No. 9,193,769 SEQ ID NO: 4 |
| BAAV (bovine AAV) | 525 | U.S. Pat. No. 9,193,769 SEQ ID NO: 2 |
| BAAV (bovine AAV) | 526 | U.S. Pat. No. 9,193,769 SEQ ID NO: 6 |
| BAAV (bovine AAV) | 527 | U.S. Pat. No. 9,193,769 SEQ ID NO: 1 |
| BAAV (bovine AAV) | 528 | U.S. Pat. No. 9,193,769 SEQ ID NO: 5 |
| BAAV (bovine AAV) | 529 | U.S. Pat. No. 9,193,769 SEQ ID NO: 3 |
| BAAV (bovine AAV) | 530 | U.S. Pat. No. 9,193,769 SEQ ID NO: 11 |
| BAAV (bovine AAV) | 531 | U.S. Pat. No. 7,427,396 SEQ ID NO: 5 |
| BAAV (bovine AAV) | 532 | U.S. Pat. No. 7,427,396 SEQ ID NO: 6 |
| BAAV (bovine AAV) | 533 | U.S. Pat. No. 9,193,769 SEQ ID NO: 7 |
| BAAV (bovine AAV) | 534 | U.S. Pat. No. 9,193,769 SEQ ID NO: 9 |
| BNP61 AAV | 535 | US20150238550 SEQ ID NO: 1 |
| BNP61 AAV | 536 | US20150238550 SEQ ID NO: 2 |
| BNP62 AAV | 537 | US20150238550 SEQ ID NO: 3 |
| BNP63 AAV | 538 | US20150238550 SEQ ID NO: 4 |
| caprine AAV | 539 | U.S. Pat. No. 7,427,396 SEQ ID NO: 3 |
| caprine AAV | 540 | U.S. Pat. No. 7,427,396 SEQ ID NO: 4 |
| true type AAV (ttAAV) | 541 | WO2015121501 SEQ ID NO: 2 |
| AAAV (Avian AAV) | 542 | U.S. Pat. No. 9,238,800 SEQ ID NO: 12 |
| AAAV (Avian AAV) | 543 | U.S. Pat. No. 9,238,800 SEQ ID NO: 2 |
| AAAV (Avian AAV) | 544 | U.S. Pat. No. 9,238,800 SEQ ID NO: 6 |
| AAAV (Avian AAV) | 545 | U.S. Pat. No. 9,238,800 SEQ ID NO: 4 |
| AAAV (Avian AAV) | 546 | U.S. Pat. No. 9,238,800 SEQ ID NO: 8 |
| AAAV (Avian AAV) | 547 | U.S. Pat. No. 9,238,800 SEQ ID NO: 14 |
| AAAV (Avian AAV) | 548 | U.S. Pat. No. 9,238,800 SEQ ID NO: 10 |
| AAAV (Avian AAV) | 549 | U.S. Pat. No. 9,238,800 SEQ ID NO: 15 |
| AAAV (Avian AAV) | 550 | U.S. Pat. No. 9,238,800 SEQ ID NO: 5 |
| AAAV (Avian AAV) | 551 | U.S. Pat. No. 9,238,800 SEQ ID NO: 9 |
| AAAV (Avian AAV) | 552 | U.S. Pat. No. 9,238,800 SEQ ID NO: 3 |
| AAAV (Avian AAV) | 553 | U.S. Pat. No. 9,238,800 SEQ ID NO: 7 |
| AAAV (Avian AAV) | 554 | U.S. Pat. No. 9,238,800 SEQ ID NO: 11 |
| AAAV (Avian AAV) | 555 | U.S. Pat. No. 9,238,800 SEQ ID NO: 13 |
| AAAV (Avian AAV) | 556 | U.S. Pat. No. 9,238,800 SEQ ID NO: 1 |
| AAV Shuffle 100-1 | 557 | US20160017295 SEQ ID NO: 23 |
| AAV Shuffle 100-1 | 558 | US20160017295 SEQ ID NO: 11 |
| AAV Shuffle 100-2 | 559 | US20160017295 SEQ ID NO: 37 |
| AAV Shuffle 100-2 | 560 | US20160017295 SEQ ID NO: 29 |
| AAV Shuffle 100-3 | 561 | US20160017295 SEQ ID NO: 24 |
| AAV Shuffle 100-3 | 562 | US20160017295 SEQ ID NO: 12 |
| AAV Shuffle 100-7 | 563 | US20160017295 SEQ ID NO: 25 |
| AAV Shuffle 100-7 | 564 | US20160017295 SEQ ID NO: 13 |
| AAV Shuffle 10-2 | 565 | US20160017295 SEQ ID NO: 34 |
| AAV Shuffle 10-2 | 566 | US20160017295 SEQ ID NO: 26 |
| AAV Shuffle 10-6 | 567 | US20160017295 SEQ ID NO: 35 |
| AAV Shuffle 10-6 | 568 | US20160017295 SEQ ID NO: 27 |
| AAV Shuffle 10-8 | 569 | US20160017295 SEQ ID NO: 36 |
| AAV Shuffle 10-8 | 570 | US20160017295 SEQ ID NO: 28 |
| AAV SM 100-10 | 571 | US20160017295 SEQ ID NO: 41 |
| AAV SM 100-10 | 572 | US20160017295 SEQ ID NO: 33 |
| AAV SM 100-3 | 573 | US20160017295 SEQ ID NO: 40 |
| AAV SM 100-3 | 574 | US20160017295 SEQ ID NO: 32 |
| AAV SM 10-1 | 575 | US20160017295 SEQ ID NO: 38 |
| AAV SM 10-1 | 576 | US20160017295 SEQ ID NO: 30 |
| AAV SM 10-2 | 577 | US20160017295 SEQ ID NO: 10 |
| AAV SM 10-2 | 578 | US20160017295 SEQ ID NO: 22 |
| AAV SM 10-8 | 579 | US20160017295 SEQ ID NO: 39 |
| AAV SM 10-8 | 580 | US20160017295 SEQ ID NO: 31 |
| AAVF1/HSC1 | 581 | WO2016049230 SEQ ID NO: 20 |
| AAVF2/HSC2 | 582 | WO2016049230 SEQ ID NO: 21 |
| AAVF3/HSC3 | 583 | WO2016049230 SEQ ID NO: 22 |
| AAVF4/HSC4 | 584 | WO2016049230 SEQ ID NO: 23 |
| AAVF5/HSC5 | 585 | WO2016049230 SEQ ID NO: 25 |
| AAVF6/HSC6 | 586 | WO2016049230 SEQ ID NO: 24 |
| AAVF7/HSC7 | 587 | WO2016049230 SEQ ID NO: 27 |
| AAVF8/HSC8 | 588 | WO2016049230 SEQ ID NO: 28 |
| AAVF9/HSC9 | 589 | WO2016049230 SEQ ID NO: 29 |
| AAVF11/HSC11 | 590 | WO2016049230 SEQ ID NO: 26 |
| AAVF12/HSC12 | 591 | WO2016049230 SEQ ID NO: 30 |
| AAVF13/HSC13 | 592 | WO2016049230 SEQ ID NO: 31 |
| AAVF14/HSC14 | 593 | WO2016049230 SEQ ID NO: 32 |
| AAVF15/HSC15 | 594 | WO2016049230 SEQ ID NO: 33 |
| AAVF16/HSC16 | 595 | WO2016049230 SEQ ID NO: 34 |
| AAVF17/HSC17 | 596 | WO2016049230 SEQ ID NO: 35 |
| AAVF1/HSC1 | 597 | WO2016049230 SEQ ID NO: 2 |
| AAVF2/HSC2 | 598 | WO2016049230 SEQ ID NO: 3 |
| AAVF3/HSC3 | 599 | WO2016049230 SEQ ID NO: 5 |
| AAVF4/HSC4 | 600 | WO2016049230 SEQ ID NO: 6 |
| AAVF5/HSC5 | 601 | WO2016049230 SEQ ID NO: 11 |
| AAVF6/HSC6 | 602 | WO2016049230 SEQ ID NO: 7 |
| AAVF7/HSC7 | 603 | WO2016049230 SEQ ID NO: 8 |
| AAVF8/HSC8 | 604 | WO2016049230 SEQ ID NO: 9 |
| AAVF9/HSC9 | 605 | WO2016049230 SEQ ID NO: 10 |
| AAVF11/HSC11 | 606 | WO2016049230 SEQ ID NO: 4 |
| AAVF12/HSC12 | 607 | WO2016049230 SEQ ID NO: 12 |
| AAVF13/HSC13 | 608 | WO2016049230 SEQ ID NO: 14 |
| AAVF14/HSC14 | 609 | WO2016049230 SEQ ID NO: 15 |
| AAVF15/HSC15 | 610 | WO2016049230 SEQ ID NO: 16 |
| AAVF16/HSC16 | 611 | WO2016049230 SEQ ID NO: 17 |
| AAVF17/HSC17 | 612 | WO2016049230 SEQ ID NO: 13 |
| AAV CBr-E1 | 613 | U.S. Pat. No. 8,734,809 SEQ ID NO: 13 |
| AAV CBr-E2 | 614 | U.S. Pat. No. 8,734,809 SEQ ID NO: 14 |
| AAV CBr-E3 | 615 | U.S. Pat. No. 8,734,809 SEQ ID NO: 15 |
| AAV CBr-E4 | 616 | U.S. Pat. No. 8,734,809 SEQ ID NO: 16 |
| AAV CBr-E5 | 617 | U.S. Pat. No. 8,734,809 SEQ ID NO: 17 |
| AAV CBr-e5 | 618 | U.S. Pat. No. 8,734,809 SEQ ID NO: 18 |
| AAV CBr-E6 | 619 | U.S. Pat. No. 8,734,809 SEQ ID NO: 19 |
| AAV CBr-E7 | 620 | U.S. Pat. No. 8,734,809 SEQ ID NO: 20 |
| AAV CBr-E8 | 621 | U.S. Pat. No. 8,734,809 SEQ ID NO: 21 |
| AAV CLv-D1 | 622 | U.S. Pat. No. 8,734,809 SEQ ID NO: 22 |
| AAV CLv-D2 | 623 | U.S. Pat. No. 8,734,809 SEQ ID NO: 23 |
| AAV CLv-D3 | 624 | U.S. Pat. No. 8,734,809 SEQ ID NO: 24 |
| AAV CLv-D4 | 625 | U.S. Pat. No. 8,734,809 SEQ ID NO: 25 |
| AAV CLv-D5 | 626 | U.S. Pat. No. 8,734,809 SEQ ID NO: 26 |
| AAV CLv-D6 | 627 | U.S. Pat. No. 8,734,809 SEQ ID NO: 27 |
| AAV CLv-D7 | 628 | U.S. Pat. No. 8,734,809 SEQ ID NO: 28 |
| AAV CLv-D8 | 629 | U.S. Pat. No. 8,734,809 SEQ ID NO: 29 |
| AAV CLv-E1 | 630 | U.S. Pat. No. 8,734,809 SEQ ID NO: 13 |
| AAV CLv-R1 | 631 | U.S. Pat. No. 8,734,809 SEQ ID NO: 30 |
| AAV CLv-R2 | 632 | U.S. Pat. No. 8,734,809 SEQ ID NO: 31 |
| AAV CLv-R3 | 633 | U.S. Pat. No. 8,734,809 SEQ ID NO: 32 |
| AAV CLv-R4 | 634 | U.S. Pat. No. 8,734,809 SEQ ID NO: 33 |
| AAV CLv-R5 | 635 | U.S. Pat. No. 8,734,809 SEQ ID NO: 34 |
| AAV CLv-R6 | 636 | U.S. Pat. No. 8,734,809 SEQ ID NO: 35 |
| AAV CLv-R7 | 637 | U.S. Pat. No. 8,734,809 SEQ ID NO: 36 |
| AAV CLv-R8 | 638 | U.S. Pat. No. 8,734,809 SEQ ID NO: 37 |
| AAV CLv-R9 | 639 | U.S. Pat. No. 8,734,809 SEQ ID NO: 38 |
| AAV CLg-F1 | 640 | U.S. Pat. No. 8,734,809 SEQ ID NO: 39 |
| AAV CLg-F2 | 641 | U.S. Pat. No. 8,734,809 SEQ ID NO: 40 |
| AAV CLg-F3 | 642 | U.S. Pat. No. 8,734,809 SEQ ID NO: 41 |
| AAV CLg-F4 | 643 | U.S. Pat. No. 8,734,809 SEQ ID NO: 42 |
| AAV CLg-F5 | 644 | U.S. Pat. No. 8,734,809 SEQ ID NO: 43 |
| AAV CLg-F6 | 645 | U.S. Pat. No. 8,734,809 SEQ ID NO: 43 |
| AAV CLg-F7 | 646 | U.S. Pat. No. 8,734,809 SEQ ID NO: 44 |
| AAV CLg-F8 | 647 | U.S. Pat. No. 8,734,809 SEQ ID NO: 43 |
| AAV CSp-1 | 648 | U.S. Pat. No. 8,734,809 SEQ ID NO: 45 |
| AAV CSp-10 | 649 | U.S. Pat. No. 8,734,809 SEQ ID NO: 46 |
| AAV CSp-11 | 650 | U.S. Pat. No. 8,734,809 SEQ ID NO: 47 |
| AAV CSp-2 | 651 | U.S. Pat. No. 8,734,809 SEQ ID NO: 48 |
| AAV CSp-3 | 652 | U.S. Pat. No. 8,734,809 SEQ ID NO: 49 |
| AAV CSp-4 | 653 | U.S. Pat. No. 8,734,809 SEQ ID NO: 50 |
| AAV CSp-6 | 654 | U.S. Pat. No. 8,734,809 SEQ ID NO: 51 |
| AAV CSp-7 | 655 | U.S. Pat. No. 8,734,809 SEQ ID NO: 52 |
| AAV CSp-8 | 656 | U.S. Pat. No. 8,734,809 SEQ ID NO: 53 |
| AAV CSp-9 | 657 | U.S. Pat. No. 8,734,809 SEQ ID NO: 54 |
| AAV CHt-2 | 658 | U.S. Pat. No. 8,734,809 SEQ ID NO: 55 |
| AAV CHt-3 | 659 | U.S. Pat. No. 8,734,809 SEQ ID NO: 56 |
| AAV CKd-1 | 660 | U.S. Pat. No. 8,734,809 SEQ ID NO: 57 |
| AAV CKd-10 | 661 | U.S. Pat. No. 8,734,809 SEQ ID NO: 58 |
| AAV CKd-2 | 662 | U.S. Pat. No. 8,734,809 SEQ ID NO: 59 |
| AAV CKd-3 | 663 | U.S. Pat. No. 8,734,809 SEQ ID NO: 60 |
| AAV CKd-4 | 664 | U.S. Pat. No. 8,734,809 SEQ ID NO: 61 |
| AAV CKd-6 | 665 | U.S. Pat. No. 8,734,809 SEQ ID NO: 62 |
| AAVC Kd-7 | 666 | U.S. Pat. No. 8,734,809 SEQ ID NO: 63 |
| AAVC Kd-8 | 667 | U.S. Pat. No. 8,734,809 SEQ ID NO: 64 |
| AAV CLv-1 | 668 | U.S. Pat. No. 8,734,809 SEQ ID NO: 65 |
| AAV CLv-12 | 669 | U.S. Pat. No. 8,734,809 SEQ ID NO: 66 |
| AAV CLv-13 | 670 | U.S. Pat. No. 8,734,809 SEQ ID NO: 67 |
| AAVC Lv-2 | 671 | U.S. Pat. No. 8,734,809 SEQ ID NO: 68 |
| AAVC Lv-3 | 672 | U.S. Pat. No. 8,734,809 SEQ ID NO: 69 |
| AAV CLv-4 | 673 | U.S. Pat. No. 8,734,809 SEQ ID NO: 70 |
| AAVC Lv-6 | 674 | U.S. Pat. No. 8,734,809 SEQ ID NO: 71 |
| AAVC Lv-8 | 675 | U.S. Pat. No. 8,734,809 SEQ ID NO: 72 |
| AAVC Kd-B1 | 676 | U.S. Pat. No. 8,734,809 SEQ ID NO: 73 |
| AAV CKd-B2 | 677 | U.S. Pat. No. 8,734,809 SEQ ID NO: 74 |
| AAV CKd-B3 | 678 | U.S. Pat. No. 8,734,809 SEQ ID NO: 75 |
| AAV CKd-B4 | 679 | U.S. Pat. No. 8,734,809 SEQ ID NO: 76 |
| AAVC Kd-B5 | 680 | U.S. Pat. No. 8,734,809 SEQ ID NO: 77 |
| AAV CKd-B6 | 681 | U.S. Pat. No. 8,734,809 SEQ ID NO: 78 |
| AAV CKd-B7 | 682 | U.S. Pat. No. 8,734,809 SEQ ID NO: 79 |
| AAV CKd-B8 | 683 | U.S. Pat. No. 8,734,809 SEQ ID NO: 80 |
| AAV CKd-H1 | 684 | U.S. Pat. No. 8,734,809 SEQ ID NO: 81 |
| AAV CKd-H2 | 685 | U.S. Pat. No. 8,734,809 SEQ ID NO: 82 |
| AAV CKd-H3 | 686 | U.S. Pat. No. 8,734,809 SEQ ID NO: 83 |
| AAV CKd-H4 | 687 | U.S. Pat. No. 8,734,809 SEQ ID NO: 84 |
| AAV CKd-H5 | 688 | U.S. Pat. No. 8,734,809 SEQ ID NO: 85 |
| AAV CKd-H6 | 689 | U.S. Pat. No. 8,734,809 SEQ ID NO: 77 |
| AAV CHt-1 | 690 | U.S. Pat. No. 8,734,809 SEQ ID NO: 86 |
| AAV CLv1-1 | 691 | U.S. Pat. No. 8,734,809 SEQ ID NO: 171 |
| AAV CLv1-2 | 692 | U.S. Pat. No. 8,734,809 SEQ ID NO: 172 |
| AAV CLv1-3 | 693 | U.S. Pat. No. 8,734,809 SEQ ID NO: 173 |
| AAV CLv1-4 | 694 | U.S. Pat. No. 8,734,809 SEQ ID NO: 174 |
| AAV CLv1-7 | 695 | U.S. Pat. No. 8,734,809 SEQ ID NO: 175 |
| AAV Clv1-8 | 696 | U.S. Pat. No. 8,734,809 SEQ ID NO: 176 |
| AAV Clv1-9 | 697 | U.S. Pat. No. 8,734,809 SEQ ID NO: 177 |
| AAV Clv1-10 | 698 | U.S. Pat. No. 8,734,809 SEQ ID NO: 178 |
| AAV.VR-355 | 699 | U.S. Pat. No. 8,734,809 SEQ ID NO: 181 |
| AAV.hu.48R3 | 700 | U.S. Pat. No. 8,734,809 SEQ ID NO: 183 |
| AAV CBr-E1 | 701 | U.S. Pat. No. 8,734,809 SEQ ID NO: 87 |
| AAV CBr-E2 | 702 | U.S. Pat. No. 8,734,809 SEQ ID NO: 88 |
| AAV CBr-E3 | 703 | U.S. Pat. No. 8,734,809 SEQ ID NO: 89 |
| AAV CBr-E4 | 704 | U.S. Pat. No. 8,734,809 SEQ ID NO: 90 |
| AAV CBr-E5 | 705 | U.S. Pat. No. 8,734,809 SEQ ID NO: 91 |
| AAV CBr-e5 | 706 | U.S. Pat. No. 8,734,809 SEQ ID NO: 92 |
| AAVC Br-E6 | 707 | U.S. Pat. No. 8,734,809 SEQ ID NO: 93 |
| AAVC Br-E7 | 708 | U.S. Pat. No. 8,734,809 SEQ ID NO: 94 |
| AAV CBr-E8 | 709 | U.S. Pat. No. 8,734,809 SEQ ID NO: 95 |
| AAV CLv-D1 | 710 | U.S. Pat. No. 8,734,809 SEQ ID NO: 96 |
| AAV CLv-D2 | 711 | U.S. Pat. No. 8,734,809 SEQ ID NO: 97 |
| AAV CLv-D3 | 712 | U.S. Pat. No. 8,734,809 SEQ ID NO: 98 |
| AAV CLv-D4 | 713 | U.S. Pat. No. 8,734,809 SEQ ID NO: 99 |
| AAV CLv-D5 | 714 | U.S. Pat. No. 8,734,809 SEQ ID NO: 100 |
| AAV CLv-D6 | 715 | U.S. Pat. No. 8,734,809 SEQ ID NO: 101 |
| AAV CLv-D7 | 716 | U.S. Pat. No. 8,734,809 SEQ ID NO: 102 |
| AAV CLv-D8 | 717 | U.S. Pat. No. 8,734,809 SEQ ID NO: 103 |
| AAV CLv-E1 | 718 | U.S. Pat. No. 8,734,809 SEQ ID NO: 87 |
| AAV CLv-R1 | 719 | U.S. Pat. No. 8,734,809 SEQ ID NO: 104 |
| AAV CLv-R2 | 720 | U.S. Pat. No. 8,734,809 SEQ ID NO: 105 |
| AAV CLv-R3 | 721 | U.S. Pat. No. 8,734,809 SEQ ID NO: 106 |
| AAV CLv-R4 | 722 | U.S. Pat. No. 8,734,809 SEQ ID NO: 107 |
| AAV CLv-R5 | 723 | U.S. Pat. No. 8,734,809 SEQ ID NO: 108 |
| AAV CLv-R6 | 724 | U.S. Pat. No. 8,734,809 SEQ ID NO: 109 |
| AAV CLv-R7 | 725 | U.S. Pat. No. 8,734,809 SEQ ID NO: 110 |
| AAV CLv-R8 | 726 | U.S. Pat. No. 8,734,809 SEQ ID NO: 111 |
| AAV CLv-R9 | 727 | U.S. Pat. No. 8,734,809 SEQ ID NO: 112 |
| AAV CLg-F1 | 728 | U.S. Pat. No. 8,734,809 SEQ ID NO: 113 |
| AAV CLg-F2 | 729 | U.S. Pat. No. 8,734,809 SEQ ID NO: 114 |
| AAV CLg-F3 | 730 | U.S. Pat. No. 8,734,809 SEQ ID NO: 115 |
| AAV CLg-F4 | 731 | U.S. Pat. No. 8,734,809 SEQ ID NO: 116 |
| AAV CLg-F5 | 732 | U.S. Pat. No. 8,734,809 SEQ ID NO: 117 |
| AAV CLg-F6 | 733 | U.S. Pat. No. 8,734,809 SEQ ID NO: 117 |
| AAV CLg-F7 | 734 | U.S. Pat. No. 8,734,809 SEQ ID NO: 118 |
| AAV CLg-F8 | 735 | U.S. Pat. No. 8,734,809 SEQ ID NO: 117 |
| AAV CSp-1 | 736 | U.S. Pat. No. 8,734,809 SEQ ID NO: 119 |
| AAV CSp-10 | 737 | U.S. Pat. No. 8,734,809 SEQ ID NO: 120 |
| AAV CSp-11 | 738 | U.S. Pat. No. 8,734,809 SEQ ID NO: 121 |
| AAV CSp-2 | 739 | U.S. Pat. No. 8,734,809 SEQ ID NO: 122 |
| AAV CSp-3 | 740 | U.S. Pat. No. 8,734,809 SEQ ID NO: 123 |
| AAV CSp-4 | 741 | U.S. Pat. No. 8,734,809 SEQ ID NO: 124 |
| AAV CSp-6 | 742 | U.S. Pat. No. 8,734,809 SEQ ID NO: 125 |
| AAV CSp-7 | 743 | U.S. Pat. No. 8,734,809 SEQ ID NO: 126 |
| AAV CSp-8 | 744 | U.S. Pat. No. 8,734,809 SEQ ID NO: 127 |
| AAV CSp-9 | 745 | U.S. Pat. No. 8,734,809 SEQ ID NO: 128 |
| AAV CHt-2 | 746 | U.S. Pat. No. 8,734,809 SEQ ID NO: 129 |
| AAV CHt-3 | 747 | U.S. Pat. No. 8,734,809 SEQ ID NO: 130 |
| AAV CKd-1 | 748 | U.S. Pat. No. 8,734,809 SEQ ID NO: 131 |
| AAV CKd-10 | 749 | U.S. Pat. No. 8,734,809 SEQ ID NO: 132 |
| AAV CKd-2 | 750 | U.S. Pat. No. 8,734,809 SEQ ID NO: 133 |
| AAV CKd-3 | 751 | U.S. Pat. No. 8,734,809 SEQ ID NO: 134 |
| AAV CKd-4 | 752 | U.S. Pat. No. 8,734,809 SEQ ID NO: 135 |
| AAV CKd-6 | 753 | U.S. Pat. No. 8,734,809 SEQ ID NO: 136 |
| AAV CKd-7 | 754 | U.S. Pat. No. 8,734,809 SEQ ID NO: 137 |
| AAV CKd-8 | 755 | U.S. Pat. No. 8,734,809 SEQ ID NO: 138 |
| AAV CLv-1 | 756 | U.S. Pat. No. 8,734,809 SEQ ID NO: 139 |
| AAV CLv-12 | 757 | U.S. Pat. No. 8,734,809 SEQ ID NO: 140 |
| AAV CLv-13 | 758 | U.S. Pat. No. 8,734,809 SEQ ID NO: 141 |
| AAV CLv-2 | 759 | U.S. Pat. No. 8,734,809 SEQ ID NO: 142 |
| AAV CLv-3 | 760 | U.S. Pat. No. 8,734,809 SEQ ID NO: 143 |
| AAV CLv-4 | 761 | U.S. Pat. No. 8,734,809 SEQ ID NO: 144 |
| AAV CLv-6 | 762 | U.S. Pat. No. 8,734,809 SEQ ID NO: 145 |
| AAV CLv-8 | 763 | U.S. Pat. No. 8,734,809 SEQ ID NO: 146 |
| AAV CKd-B1 | 764 | U.S. Pat. No. 8,734,809 SEQ ID NO: 147 |
| AAV CKd-B2 | 765 | U.S. Pat. No. 8,734,809 SEQ ID NO: 148 |
| AAV CKd-B3 | 766 | U.S. Pat. No. 8,734,809 SEQ ID NO: 149 |
| AAV CKd-B4 | 767 | U.S. Pat. No. 8,734,809 SEQ ID NO: 150 |
| AAV CKd-B5 | 768 | U.S. Pat. No. 8,734,809 SEQ ID NO: 151 |
| AAV CKd-B6 | 769 | U.S. Pat. No. 8,734,809 SEQ ID NO: 152 |
| AAV CKd-B7 | 770 | U.S. Pat. No. 8,734,809 SEQ ID NO: 153 |
| AAV CKd-B8 | 771 | U.S. Pat. No. 8,734,809 SEQ ID NO: 154 |
| AAV CKd-H1 | 772 | U.S. Pat. No. 8,734,809 SEQ ID NO: 155 |
| AAV CKd-H2 | 773 | U.S. Pat. No. 8,734,809 SEQ ID NO: 156 |
| AAV CKd-H3 | 774 | U.S. Pat. No. 8,734,809 SEQ ID NO: 157 |
| AAV CKd-H4 | 775 | U.S. Pat. No. 8,734,809 SEQ ID NO: 158 |
| AAV CKd-H5 | 776 | U.S. Pat. No. 8,734,809 SEQ ID NO: 159 |
| AAV CKd-H6 | 777 | U.S. Pat. No. 8,734,809 SEQ ID NO: 151 |
| AAV CHt-1 | 778 | U.S. Pat. No. 8,734,809 SEQ ID NO: 160 |
| AAV CHt-P2 | 779 | WO2016065001 SEQ ID NO: 1 |
| AAV CHt-P5 | 780 | WO2016065001 SEQ ID NO: 2 |
| AAV CHt-P9 | 781 | WO2016065001 SEQ ID NO: 3 |
| AAV CBr-7.1 | 782 | WO2016065001 SEQ ID NO: 4 |
| AAV CBr-7.2 | 783 | WO2016065001 SEQ ID NO: 5 |
| AAV CBr-7.3 | 784 | WO2016065001 SEQ ID NO: 6 |
| AAV CBr-7.4 | 785 | WO2016065001 SEQ ID NO: 7 |
| AAV CBr-7.5 | 786 | WO2016065001 SEQ ID NO: 8 |
| AAV CBr-7.7 | 787 | WO2016065001 SEQ ID NO: 9 |
| AAV CBr-7.8 | 788 | WO2016065001 SEQ ID NO: 10 |
| AAV CBr-7.10 | 789 | WO2016065001 SEQ ID NO: 11 |
| AAV CKd-N3 | 790 | WO2016065001 SEQ ID NO: 12 |
| AAV CKd-N4 | 791 | WO2016065001 SEQ ID NO: 13 |
| AAV CKd-N9 | 792 | WO2016065001 SEQ ID NO: 14 |
| AAV CLv-L4 | 793 | WO2016065001 SEQ ID NO: 15 |
| AAV CLv-L5 | 794 | WO2016065001 SEQ ID NO: 16 |
| AAV CLv-L6 | 795 | WO2016065001 SEQ ID NO: 17 |
| AAV CLv-K1 | 796 | WO2016065001 SEQ ID NO: 18 |
| AAV CLv-K3 | 797 | WO2016065001 SEQ ID NO: 19 |
| AAV CLv-K6 | 798 | WO2016065001 SEQ ID NO: 20 |
| AAV CLv-M1 | 799 | WO2016065001 SEQ ID NO: 21 |
| AAV CLv-M11 | 800 | WO2016065001 SEQ ID NO: 22 |
| AAV CLv-M2 | 801 | WO2016065001 SEQ ID NO: 23 |
| AAV CLv-M5 | 802 | WO2016065001 SEQ ID NO: 24 |
| AAV CLv-M6 | 803 | WO2016065001 SEQ ID NO: 25 |
| AAV CLv-M7 | 804 | WO2016065001 SEQ ID NO: 26 |
| AAV CLv-M8 | 805 | WO2016065001 SEQ ID NO: 27 |
| AAV CLv-M9 | 806 | WO2016065001 SEQ ID NO: 28 |
| AAV CHt-P1 | 807 | WO2016065001 SEQ ID NO: 29 |
| AAV CHt-P6 | 808 | WO2016065001 SEQ ID NO: 30 |
| AAV CHt-P8 | 809 | WO2016065001 SEQ ID NO: 31 |
| AAV CHt-6.1 | 810 | WO2016065001 SEQ ID NO: 32 |
| AAV CHt-6.10 | 811 | WO2016065001 SEQ ID NO: 33 |
| AAV CHt-6.5 | 812 | WO2016065001 SEQ ID NO: 34 |
| AAV CHt-6.6 | 813 | WO2016065001 SEQ ID NO: 35 |
| AAV CHt-6.7 | 814 | WO2016065001 SEQ ID NO: 36 |
| AAV CHt-6.8 | 815 | WO2016065001 SEQ ID NO: 37 |
| AAV CSp-8.10 | 816 | WO2016065001 SEQ ID NO: 38 |
| AAV CSp-8.2 | 817 | WO2016065001 SEQ ID NO: 39 |
| AAV CSp-8.4 | 818 | WO2016065001 SEQ ID NO: 40 |
| AAV CSp-8.5 | 819 | WO2016065001 SEQ ID NO: 41 |
| AAV CSp-8.6 | 820 | WO2016065001 SEQ ID NO: 42 |
| AAV CSp-8.7 | 821 | WO2016065001 SEQ ID NO: 43 |
| AAV CSp-8.8 | 822 | WO2016065001 SEQ ID NO: 44 |
| AAV CSp-8.9 | 823 | WO2016065001 SEQ ID NO: 45 |
| AAV CBr-B7.3 | 824 | WO2016065001 SEQ ID NO: 46 |
| AAV CBr-B7.4 | 825 | WO2016065001 SEQ ID NO: 47 |
| AAV3B | 826 | WO2016065001 SEQ ID NO: 48 |
| AAV4 | 827 | WO2016065001 SEQ ID NO: 49 |
| AAV5 | 828 | WO2016065001 SEQ ID NO: 50 |
| AAV CHt-P2 | 829 | WO2016065001 SEQ ID NO: 51 |
| AAV CHt-P5 | 830 | WO2016065001 SEQ ID NO: 52 |
| AAV CHt-P9 | 831 | WO2016065001 SEQ ID NO: 53 |
| AAV CBr-7.1 | 832 | WO2016065001 SEQ ID NO: 54 |
| AAV CBr-7.2 | 833 | WO2016065001 SEQ ID NO: 55 |
| AAV CBr-7.3 | 834 | WO2016065001 SEQ ID NO: 56 |
| AAV CBr-7.4 | 835 | WO2016065001 SEQ ID NO: 57 |
| AAV CBr-7.5 | 836 | WO2016065001 SEQ ID NO: 58 |
| AAV CBr-7.7 | 837 | WO2016065001 SEQ ID NO: 59 |
| AAV CBr-7.8 | 838 | WO2016065001 SEQ ID NO: 60 |
| AAV CBr-7.10 | 839 | WO2016065001 SEQ ID NO: 61 |
| AAV CKd-N3 | 840 | WO2016065001 SEQ ID NO: 62 |
| AAV CK4-N4 | 841 | WO2016065001 SEQ ID NO: 63 |
| AAV CKd-N9 | 842 | WO2016065001 SEQ ID NO: 64 |
| AAV CLv-L4 | 843 | WO2016065001 SEQ ID NO: 65 |
| AAV CLv-L5 | 844 | WO2016065001 SEQ ID NO: 66 |
| AAV CLv-L6 | 845 | WO2016065001 SEQ ID NO: 67 |
| AAV CLv-K1 | 846 | WO2016065001 SEQ ID NO: 68 |
| AAV CLv-K3 | 847 | WO2016065001 SEQ ID NO: 69 |
| AAV CLv-K6 | 848 | WO2016065001 SEQ ID NO: 70 |
| AAV CLv-M1 | 849 | WO2016065001 SEQ ID NO: 71 |
| AAV CLv-M11 | 850 | WO2016065001 SEQ ID NO: 72 |
| AAV CLv-M2 | 851 | WO2016065001 SEQ ID NO: 73 |
| AAV CLv-M5 | 852 | WO2016065001 SEQ ID NO: 74 |
| AAV CLv-M6 | 853 | WO2016065001 SEQ ID NO: 75 |
| AAV CLv-M7 | 854 | WO2016065001 SEQ ID NO: 76 |
| AAV CLv-M8 | 855 | WO2016065001 SEQ ID NO: 77 |
| AAV CLv-M9 | 856 | WO2016065001 SEQ ID NO: 78 |
| AAV CHt-P1 | 857 | WO2016065001 SEQ ID NO: 79 |
| AAV CHt-P6 | 858 | WO2016065001 SEQ ID NO: 80 |
| AAV CHt-P8 | 859 | WO2016065001 SEQ ID NO: 81 |
| AAV CHt-6.1 | 860 | WO2016065001 SEQ ID NO: 82 |
| AAV CHt-6.10 | 861 | WO2016065001 SEQ ID NO: 83 |
| AAV CHt-6.5 | 862 | WO2016065001 SEQ ID NO: 84 |
| AAV CHt-6.6 | 863 | WO2016065001 SEQ ID NO: 85 |
| AAV CHt-6.7 | 864 | WO2016065001 SEQ ID NO: 86 |
| AAV CHt-6.8 | 865 | WO2016065001 SEQ ID NO: 87 |
| AAV CSp-8.10 | 866 | WO2016065001 SEQ ID NO: 88 |
| AAV CSp-8.2 | 867 | WO2016065001 SEQ ID NO: 89 |
| AAV CSp-8.4 | 868 | WO2016065001 SEQ ID NO: 90 |
| AAV CSp-8.5 | 869 | WO2016065001 SEQ ID NO: 91 |
| AAV CSp-8.6 | 870 | WO2016065001 SEQ ID NO: 92 |
| AAV CSp-8.7 | 871 | WO2016065001 SEQ ID NO: 93 |
| AAV CSp-8.8 | 872 | WO2016065001 SEQ ID NO: 94 |
| AAV CSp-8.9 | 873 | WO2016065001 SEQ ID NO: 95 |
| AAV CBr-B7.3 | 874 | WO2016065001 SEQ ID NO: 96 |
| AAV CBr-B7.4 | 875 | WO2016065001 SEQ ID NO: 97 |
| AAV3B | 876 | WO2016065001 SEQ ID NO: 98 |
| AAV4 | 877 | WO2016065001 SEQ ID NO: 99 |
| AAV5 | 878 | WO2016065001 SEQ ID NO: 100 |
| GPV | 879 | U.S. Pat. No. 9,624,274B2 SEQ ID NO: 192 |
| B19 | 880 | U.S. Pat. No. 9,624,274B2 SEQ ID NO: 193 |
| MVM | 881 | U.S. Pat. No. 9,624,274B2 SEQ ID NO: 194 |
| FPV | 882 | U.S. Pat. No. 9,624,274B2 SEQ ID NO: 195 |
| CPV | 883 | U.S. Pat. No. 9,624,274B2 SEQ ID NO: 196 |
| AAV6 | 884 | U.S. Pat. No. 9,546,112B2 SEQ ID NO: 5 |
| AAV6 | 885 | U.S. Pat. No. 9,457,103B2 SEQ ID NO: 1 |
| AAV2 | 886 | U.S. Pat. No. 9,457,103B2 SEQ ID NO: 2 |
| ShH10 | 887 | U.S. Pat. No. 9,457,103B2 SEQ ID NO: 3 |
| ShH13 | 888 | U.S. Pat. No. 9,457,103B2 SEQ ID NO: 4 |
| ShH10 | 889 | U.S. Pat. No. 9,457,103B2 SEQ ID NO: 5 |
| ShH10 | 890 | U.S. Pat. No. 9,457,103B2 SEQ ID NO: 6 |
| ShH10 | 891 | U.S. Pat. No. 9,457,103B2 SEQ ID NO: 7 |
| ShH10 | 892 | U.S. Pat. No. 9,457,103B2 SEQ ID NO: 8 |
| ShH10 | 893 | U.S. Pat. No. 9,457,103B2 SEQ ID NO: 9 |
| rh74 | 894 | U.S. Pat. No. 9,434,928B2 SEQ ID NO: 1, |
| | | US2015023924A1 SEQ ID NO: 2 |
| rh74 | 895 | U.S. Pat. No. 9,434,928B2 SEQ ID NO: 2, |
| | | US2015023924A1 SEQ ID NO: 1 |
| AAV8 | 896 | U.S. Pat. No. 9,434,928B2 SEQ ID NO: 4 |
| rh74 | 897 | U.S. Pat. No. 9,434,928B2 SEQ ID NO: 5 |
| rh74 (RHM4-1) | 898 | US2015023924A1 SEQ ID NO: 5, US20160375110A1 |
| | | SEQ ID NO: 4 |
| rh74 (RHM15-1) | 899 | US2015023924A1 SEQ ID NO: 6, US20160375110A1 |
| | | SEQ ID NO: 5 |
| rh74 (RHM15-2) | 900 | US2015023924A1 SEQ ID NO: 7, US20160375110A1 |
| | | SEQ ID NO: 6 |
| rh74 (RHM15-3/RHM15-5) | 901 | US2015023924A1 SEQ ID NO: 8, US20160375110A1 |
| | | SEQ ID NO: 7 |
| rh74 (RHM15-4) | 902 | US2015023924A1 SEQ ID NO: 9, US20160375110A1 |
| | | SEQ ID NO: 8 |
| rh74 (RHM15-6) | 903 | US2015023924A1 SEQ ID NO: 10, US20160375110A1 |
| | | SEQ ID NO: 9 |
| rh74 (RHM4-1) | 904 | US2015023924A1 SEQ ID NO: 11 |
| rh74 (RHM15-1) | 905 | US2015023924A1 SEQ ID NO: 12 |
| rh74 (RHM15-2) | 906 | US2015023924A1 SEQ ID NO: 13 |
| rh74 (RHM15-3/RHM15-5) | 907 | US2015023924A1 SEQ ID NO: 14 |
| rh74 (RHM15-4) | 908 | US2015023924A1 SEQ ID NO: 15 |
| rh74 (RHM15-6) | 909 | US2015023924A1 SEQ ID NO: 16 |
| AAV2 (comprising lung | 910 | US20160175389A1 SEQ ID NO: 9 |
| specific polypeptide) | | |
| AAV2 (comprising lung | 911 | US20160175389A1 SEQ ID NO: 10 |
| specific polypeptide) | | |
| Anc80 | 912 | US20170051257A1 SEQ ID NO: 1 |
| Anc80 | 913 | US20170051257A1 SEQ ID NO: 2 |
| Anc81 | 914 | US20170051257A1 SEQ ID NO: 3 |
| Anc80 | 915 | US20170051257A1 SEQ ID NO: 4 |
| Anc82 | 916 | US20170051257A1 SEQ ID NO: 5 |
| Anc82 | 917 | US20170051257A1 SEQ ID NO: 6 |
| Anc83 | 918 | US20170051257A1 SEQ ID NO: 7 |
| Anc83 | 919 | US20170051257A1 SEQ ID NO: 8 |
| Anc84 | 920 | US20170051257A1 SEQ ID NO: 9 |
| Anc84 | 921 | US20170051257A1 SEQ ID NO: 10 |
| Anc94 | 922 | US20170051257A1 SEQ ID NO: 11 |
| Anc94 | 923 | US20170051257A1 SEQ ID NO: 12 |
| Anc113 | 924 | US20170051257A1 SEQ ID NO: 13 |
| Anc113 | 925 | US20170051257A1 SEQ ID NO: 14 |
| Anc126 | 926 | US20170051257A1 SEQ ID NO: 15 |
| Anc126 | 927 | US20170051257A1 SEQ ID NO: 16 |
| Anc127 | 928 | US20170051257A1 SEQ ID NO: 17 |
| Anc127 | 929 | US20170051257A1 SEQ ID NO: 18 |
| Anc80L27 | 930 | US20170051257A1 SEQ ID NO: 19 |
| Anc80L59 | 931 | US20170051257A1 SEQ ID NO: 20 |
| Anc80L60 | 932 | US20170051257A1 SEQ ID NO: 21 |
| Anc80L62 | 933 | US20170051257A1 SEQ ID NO: 22 |
| Anc80L65 | 934 | US20170051257A1 SEQ ID NO: 23 |
| Anc80L33 | 935 | US20170051257A1 SEQ ID NO: 24 |
| Anc80L36 | 936 | US20170051257A1 SEQ ID NO: 25 |
| Anc80L44 | 937 | US20170051257A1 SEQ ID NO: 26 |
| Anc80L1 | 938 | US2017005I257A1 SEQ ID NO: 35 |
| Anc80L1 | 939 | US20170051257A1 SEQ ID NO: 36 |
| AAV-X1 | 940 | U.S. Pat. No. 8,283,151B2 SEQ ID NO: 11 |
| AAV-X1b | 941 | U.S. Pat. No. 8,283,151B2 SEQ ID NO: 12 |
| AAV-X5 | 942 | U.S. Pat. No. 8,283,151B2 SEQ ID NO: 13 |
| AAV-X19 | 943 | U.S. Pat. No. 8,283,151B2 SEQ ID NO: 14 |
| AAV-X21 | 944 | U.S. Pat. No. 8,283,151B2 SEQ ID NO: 15 |
| AAV-X22 | 945 | U.S. Pat. No. 8,283,151B2 SEQ ID NO: 16 |
| AAV-X23 | 946 | U.S. Pat. No. 8,283,151B2 SEQ ID NO: 17 |
| AAV-X24 | 947 | U.S. Pat. No. 8,283,151B2 SEQ ID NO: 18 |
| AAV-X25 | 948 | U.S. Pat. No. 8,283,151B2 SEQ ID NO: 19 |
| AAV-X26 | 949 | U.S. Pat. No. 8,283,151B2 SEQ ID NO: 20 |
| AAV-X1 | 950 | U.S. Pat. No. 8,283,151B2 SEQ ID NO: 21 |
| AAV-X1b | 951 | U.S. Pat. No. 8,283,151B2 SEQ ID NO: 22 |
| AAV-X5 | 952 | U.S. Pat. No. 8,283,151B2 SEQ ID NO: 23 |
| AAV-X19 | 953 | U.S. Pat. No. 8,283,151B2 SEQ ID NO: 24 |
| AAV-X21 | 954 | U.S. Pat. No. 8,283,151B2 SEQ ID NO: 25 |
| AAV-X22 | 955 | U.S. Pat. No. 8,283,151B2 SEQ ID NO: 26 |
| AAV-X23 | 956 | U.S. Pat. No. 8,283,151B2 SEQ ID NO: 27 |
| AAV-X24 | 957 | U.S. Pat. No. 8,283,151B2 SEQ ID NO: 28 |
| AAV-X25 | 958 | U.S. Pat. No. 8,283,151B2 SEQ ID NO: 29 |
| AAV-X26 | 959 | U.S. Pat. No. 8,283,151B2 SEQ ID NO: 30 |
| AAVrh8 | 960 | WO2016054554A1 SEQ ID NO: 8 |
| AAVrh8VP2FC5 | 961 | WO2016054554A1 SEQ ID NO: 9 |
| AAVrh8VP2FC44 | 962 | WO2016054554A1 SEQ ID NO: 10 |
| AAVrh8VP2ApoB100 | 963 | WO2016054554A1 SEQ ID NO: 11 |
| AAVrh8VP2RVG | 964 | WO2016054554A1 SEQ ID NO: 12 |
| AAVrh8VP2Angiopep-2 | 965 | WO2016054554A1 SEQ ID NO: 13 |
| VP2 | | |
| AAV9.47VP1.3 | 966 | WO2016054554A1 SEQ ID NO: 14 |
| AAV9.47VP2ICAMg3 | 967 | WO2016054554A1 SEQ ID NO: 15 |
| AAV9.47VP2RVG | 968 | WO2016054554A1 SEQ ID NO: 16 |
| AAV9.47VP2Angiopep-2 | 969 | WO2016054554A1 SEQ ID NO: 17 |
| AAV9.47VP2A-string | 970 | WO2016054554A1 SEQ ID NO: 18 |
| AAVrh8VP2FC5 VP2 | 971 | WO2016054554A1 SEQ ID NO: 19 |
| AAVrb8VP2FC44 VP2 | 972 | WO2016054554A1 SEQ ID NO: 20 |
| AAVrh8VP2ApoB100 VP2 | 973 | WO2016054554A1 SEQ ID NO: 21 |
| AAVrh8VP2RVG VP2 | 974 | WO2016054554A1 SEQ ID NO: 22 |
| AAVrh8VP2Angiopep-2 | 975 | WO2016054554A1 SEQ ID NO: 23 |
| VP2 | | |
| AAV9.47VP2ICAMg3 VP2 | 976 | WO2016054554A1 SEQ ID NO: 24 |
| AAV9.47VP2RVG VP2 | 977 | WO2016054554A1 SEQ ID NO: 25 |
| AAV9.47VP2Angiopep-2 | 978 | WO2016054554A1 SEQ ID NO: 26 |
| VP2 | | |
| AAV9.47VP2A-string VP2 | 979 | WO2016054554A1 SEQ ID NO: 27 |
| rAAV-B1 | 980 | WO2016054557A1 SEQ ID NO: 1 |
| rAAV-B2 | 981 | WO2016054557A1 SEQ ID NO: 2 |
| rAAV-B3 | 982 | WO2016054557A1 SEQ ID NO: 3 |
| rAAV-B4 | 983 | WO2016054557A1 SEQ ID NO: 4 |
| rAAV-B1 | 984 | WO2016054557A1 SEQ ID NO: 5 |
| rAAV-B2 | 985 | WO2016054557A1 SEQ ID NO: 6 |
| rAAV-B3 | 986 | WO2016054557A1 SEQ ID NO: 7 |
| rAAV-B4 | 987 | WO2016054557A1 SEQ ID NO: 8 |
| rAAV-L1 | 988 | WO2016054557A1 SEQ ID NO: 9 |
| rAAV-L2 | 989 | WO2016054557A1 SEQ ID NO: 10 |
| rAAV-L3 | 990 | WO2016054557A1 SEQ ID NO: 11 |
| rAAV-L4 | 991 | WO2016054557A1 SEQ ID NO: 12 |
| rAAV-L1 | 992 | WO2016054557A1 SEQ ID NO: 13 |
| rAAV-L2 | 993 | WO2016054557A1 SEQ ID NO: 14 |
| rAAV-L3 | 994 | WO2016054557A1 SEQ ID NO: 15 |
| rAAV-L4 | 995 | WO2016054557A1 SEQ ID NO: 16 |
| AAV9 | 996 | WO2016073739A1 SEQ ID NO: 3 |
| rAAV | 997 | WO2016081811A1 SEQ ID NO: 1 |
| rAAV | 998 | WO2016081811A1 SEQ ID NO: 2 |
| rAAV | 999 | WO2016081811A1 SEQ ID NO: 3 |
| rAAV | 1000 | WO2016081811A1 SEQ ID NO: 4 |
| rAAV | 1001 | WO2016081811A1 SEQ ID NO: 5 |
| rAAV | 1002 | WO2016081811A1 SEQ ID NO: 6 |
| rAAV | 1003 | WO2016081811A1 SEQ ID NO: 7 |
| rAAV | 1004 | WO2016081811A1 SEQ ID NO: 8 |
| rAAV | 1005 | WO2016081811A1 SEQ ID NO: 9 |
| rAAV | 1006 | WO2016081811A1 SEQ ID NO: 10 |
| rAAV | 1007 | WO2016081811A1 SEQ ID NO: 11 |
| rAAV | 1008 | WO2016081811A1 SEQ ID NO: 12 |
| rAAV | 1009 | WO2016081811A1 SEQ ID NO: 13 |
| rAAV | 1010 | WO2016081811A1 SEQ ID NO: 14 |
| rAAV | 1011 | WO2016081811A1 SEQ ID NO: 15 |
| rAAV | 1012 | WO2016081811A1 SEQ ID NO: 16 |
| rAAV | 1013 | WO2016081811A1 SEQ ID NO: 17 |
| rAAV | 1014 | WO2016081811A1 SEQ ID NO: 18 |
| rAAV | 1015 | WO2016081811A1 SEQ ID NO: 19 |
| rAAV | 1016 | WO2016081811A1 SEQ ID NO: 20 |
| rAAV | 1017 | WO2016081811A1 SEQ ID NO: 21 |
| rAAV | 1018 | WO2016081811A1 SEQ ID NO: 22 |
| rAAV | 1019 | WO2016081811A1 SEQ ID NO: 23 |
| rAAV | 1020 | WO2016081811A1 SEQ ID NO: 24 |
| rAAV | 1021 | WO2016081811A1 SEQ ID NO: 25 |
| rAAV | 1022 | WO2016081811A1 SEQ ID NO: 26 |
| rAAV | 1023 | WO2016081811A1 SEQ ID NO: 27 |
| rAAV | 1024 | WO2016081811A1 SEQ ID NO: 28 |
| rAAV | 1025 | WO2016081811A1 SEQ ID NO: 29 |
| rAAV | 1026 | WO2016081811A1 SEQ ID NO: 30 |
| rAAV | 1027 | WO2016081811A1 SEQ ID NO: 31 |
| rAAV | 1028 | WO2016081811A1 SEQ ID NO: 32 |
| rAAV | 1029 | WO2016081811A1 SEQ ID NO: 33 |
| rAAV | 1030 | WO2016081811A1 SEQ ID NO: 34 |
| rAAV | 1031 | WO2016081811A1 SEQ ID NO: 35 |
| rAAV | 1032 | WO2016081811A1 SEQ ID NO: 36 |
| rAAV | 1033 | WO2016081811A1 SEQ ID NO: 37 |
| rAAV | 1034 | WO2016081811A1 SEQ ID NO: 38 |
| rAAV | 1035 | WO2016081811A1 SEQ ID NO: 39 |
| rAAV | 1036 | WO2016081811A1 SEQ ID NO: 40 |
| rAAV | 1037 | WO2016081811A1 SEQ ID NO: 41 |
| rAAV | 1038 | WO2016081811A1 SEQ ID NO: 42 |
| rAAV | 1039 | WO2016081811A1 SEQ ID NO: 43 |
| rAAV | 1040 | WO2016081811A1 SEQ ID NO: 44 |
| rAAV | 1041 | WO201608I811A1 SEQ ID NO: 45 |
| rAAV | 1042 | WO2016081811A1 SEQ ID NO: 46 |
| rAAV | 1043 | WO2016081811A1 SEQ ID NO: 47 |
| rAAV | 1044 | WO2016081811A1 SEQ ID NO: 48 |
| rAAV | 1045 | WO2016081811A1 SEQ ID NO: 49 |
| rAAV | 1046 | WO2016081811A1 SEQ ID NO: 50 |
| rAAV | 1047 | WO2016081811A1 SEQ ID NO: 51 |
| rAAV | 1048 | WO2016081811A1 SEQ ID NO: 52 |
| rAAV | 1049 | WO2016081811A1 SEQ ID NO: 53 |
| rAAV | 1050 | WO2016081811A1 SEQ ID NO: 54 |
| rAAV | 1051 | WO2016081811A1 SEQ ID NO: 55 |
| rAAV | 1052 | WO2016081811A1 SEQ ID NO: 56 |
| rAAV | 1053 | WO2016081811A1 SEQ ID NO: 57 |
| rAAV | 1054 | WO2016081811A1 SEQ ID NO: 58 |
| rAAV | 1055 | WO2016081811A1 SEQ ID NO: 59 |
| rAAV | 1056 | WO2016081811A1 SEQ ID NO: 60 |
| rAAV | 1057 | WO2016081811A1 SEQ ID NO: 61 |
| rAAV | 1058 | WO2016081811A1 SEQ ID NO: 62 |
| rAAV | 1059 | WO2016081811A1 SEQ ID NO: 63 |
| rAAV | 1060 | WO2016081811A1 SEQ ID NO: 64 |
| rAAV | 1061 | WO2016081811A1 SEQ ID NO: 65 |
| rAAV | 1062 | WO2016081811A1 SEQ ID NO: 66 |
| rAAV | 1063 | WO2016081811A1 SEQ ID NO: 67 |
| rAAV | 1064 | WO2016081811A1 SEQ ID NO: 68 |
| rAAV | 1065 | WO2016081811A1 SEQ ID NO: 69 |
| rAAV | 1066 | WO2016081811A1 SEQ ID NO: 70 |
| rAAV | 1067 | WO2016081811A1 SEQ ID NO: 71 |
| rAAV | 1068 | WO2016081811A1 SEQ ID NO: 72 |
| rAAV | 1069 | WO2016081811A1 SEQ ID NO: 73 |
| rAAV | 1070 | WO2016081811A1 SEQ ID NO: 74 |
| rAAV | 1071 | WO2016081811A1 SEQ ID NO: 75 |
| rAAV | 1072 | WO2016081811A1 SEQ ID NO: 76 |
| rAAV | 1073 | WO2016081811A1 SEQ ID NO: 77 |
| rAAV | 1074 | WO2016081811A1 SEQ ID NO: 78 |
| rAAV | 1075 | WO2016081811A1 SEQ ID NO: 79 |
| rAAV | 1076 | WO2016081811A1 SEQ ID NO: 80 |
| rAAV | 1077 | WO2016081811A1 SEQ ID NO: 81 |
| rAAV | 1078 | WO2016081811A1 SEQ ID NO: 82 |
| rAAV | 1079 | WO2016081811A1 SEQ ID NO: 83 |
| rAAV | 1080 | WO2016081811A1 SEQ ID NO: 84 |
| rAAV | 1081 | WO2016081811A1 SEQ ID NO: 85 |
| rAAV | 1082 | WO2016081811A1 SEQ ID NO: 86 |
| rAAV | 1083 | WO2016081811A1 SEQ ID NO: 87 |
| rAAV | 1084 | WO2016081811A1 SEQ ID NO: 88 |
| rAAV | 1085 | WO2016081811A1 SEQ ID NO: 89 |
| rAAV | 1086 | WO2016081811A1 SEQ ID NO: 90 |
| rAAV | 1087 | WO2016081811A1 SEQ ID NO: 91 |
| rAAV | 1088 | WO2016081811A1 SEQ ID NO: 92 |
| rAAV | 1089 | WO2016081811A1 SEQ ID NO: 93 |
| rAAV | 1090 | WO2016081811A1 SEQ ID NO: 94 |
| rAAV | 1091 | WO2016081811A1 SEQ ID NO: 95 |
| rAAV | 1092 | WO2016081811A1 SEQ ID NO: 96 |
| rAAV | 1093 | WO2016081811A1 SEQ ID NO: 97 |
| rAAV | 1094 | WO2016081811A1 SEQ ID NO: 98 |
| rAAV | 1095 | WO2016081811A1 SEQ ID NO: 99 |
| rAAV | 1096 | WO2016081811A1 SEQ ID NO: 100 |
| rAAV | 1097 | WO2016081811A1 SEQ ID NO: 101 |
| rAAV | 1098 | WO2016081811A1 SEQ ID NO: 102 |
| rAAV | 1099 | WO2016081811A1 SEQ ID NO: 103 |
| rAAV | 1100 | WO2016081811A1 SEQ ID NO: 104 |
| rAAV | 1101 | WO2016081811A1 SEQ ID NO: 105 |
| rAAV | 1102 | WO2016081811A1 SEQ ID NO: 106 |
| rAAV | 1103 | WO2016081811A1 SEQ ID NO: 107 |
| rAAV | 1104 | WO2016081811A1 SEQ ID NO: 108 |
| rAAV | 1105 | WO2016081811A1 SEQ ID NO: 109 |
| rAAV | 1106 | WO2016081811A1 SEQ ID NO: 110 |
| rAAV | 1107 | WO2016081811A1 SEQ ID NO: 111 |
| rAAV | 1108 | WO2016081811A1 SEQ ID NO: 112 |
| rAAV | 1109 | WO2016081811A1 SEQ ID NO: 113 |
| rAAV | 1110 | WO2016081811A1 SEQ ID NO: 114 |
| rAAV | 1111 | WO2016081811A1 SEQ ID NO: 115 |
| rAAV | 1112 | WO2016081811A1 SEQ ID NO: 116 |
| rAAV | 1113 | WO2016081811A1 SEQ ID NO: 117 |
| rAAV | 1114 | WO2016081811A1 SEQ ID NO: 118 |
| rAAV | 1115 | WO2016081811A1 SEQ ID NO: 119 |
| rAAV | 1116 | WO2016081811A1 SEQ ID NO: 120 |
| rAAV | 1117 | WO2016081811A1 SEQ ID NO: 121 |
| rAAV | 1118 | WO2016081811A1 SEQ ID NO: 122 |
| rAAV | 1119 | WO2016081811A1 SEQ ID NO: 123 |
| rAAV | 1120 | WO2016081811A1 SEQ ID NO: 124 |
| rAAV | 1121 | WO2016081811A1 SEQ ID NO: 125 |
| rAAV | 1122 | WO2016081811A1 SEQ ID NO: 126 |
| rAAV | 1123 | WO2016081811A1 SEQ ID NO: 127 |
| rAAV | 1124 | WO2016081811A1 SEQ ID NO: 128 |
| AAV8 E532K | 1125 | WO2016081811A1 SEQ ID NO: 133 |
| AAV8 E532K | 1126 | WO2016081811A1 SEQ ID NO: 134 |
| rAAV4 | 1127 | WO2016115382A1 SEQ ID NO: 2 |
| rAAV4 | 1128 | WO2016115382A1 SEQ ID NO: 3 |
| rAAV4 | 1129 | WO2016115382A1 SEQ ID NO: 4 |
| rAAV4 | 1130 | WO2016115382A1 SEQ ID NO: 5 |
| rAAV4 | 1131 | WO2016115382A1 SEQ ID NO: 6 |
| rAAV4 | 1132 | WO2016115382A1 SEQ ID NO: 7 |
| rAAV4 | 1133 | WO2016115382A1 SEQ ID NO: 8 |
| rAAV4 | 1134 | WO2016115382A1 SEQ ID NO: 9 |
| rAAV4 | 1135 | WO2016115382A1 SEQ ID NO: 10 |
| rAAV4 | 1136 | WO2016115382A1 SEQ ID NO: 11 |
| rAAV4 | 1137 | WO2016115382A1 SEQ ID NO: 12 |
| rAAV4 | 1138 | WO2016115382A1 SEQ ID NO: 13 |
| rAAV4 | 1139 | WO2016115382A1 SEQ ID NO: 14 |
| rAAV4 | 1140 | WO2016115382A1 SEQ ID NO: 15 |
| rAAV4 | 1141 | WO2016115382A1 SEQ ID NO: 16 |
| rAAV4 | 1142 | WO2016115382A1 SEQ ID NO: 17 |
| rAAV4 | 1143 | WO2016115382A1 SEQ ID NO: 18 |
| rAAV4 | 1144 | WO2016115382A1 SEQ ID NO: 19 |
| rAAV4 | 1145 | WO2016115382A1 SEQ ID NO: 20 |
| rAAV4 | 1146 | WO2016115382A1 SEQ ID NO: 21 |
| AAV11 | 1147 | WO2016115382A1 SEQ ID NO: 22 |
| AAV12 | 1148 | WO2016115382A1 SEQ ID NO: 23 |
| rh32 | 1149 | WO2016115382A1 SEQ ID NO: 25 |
| rh33 | 1150 | WO2016115382A1 SEQ ID NO: 26 |
| rh34 | 1151 | WO2016115382A1 SEQ ID NO: 27 |
| rAAV4 | 1152 | WO2016115382A1 SEQ ID NO: 28 |
| rAAV4 | 1153 | WO2016115382A1 SEQ ID NO: 29 |
| rAAV4 | 1154 | WO2016115382A1 SEQ ID NO: 30 |
| rAAV4 | 1155 | WO2016115382A1 SEQ ID NO: 31 |
| rAAV4 | 1156 | WO2016115382A1 SEQ ID NO: 32 |
| rAAV4 | 1157 | WO2016115382A1 SEQ ID NO: 33 |
| AAV2/8 | 1158 | WO2016131981A1 SEQ ID NO: 47 |
| AAV2/8 | 1159 | WO2016131981A1 SEQ ID NO: 48 |
| ancestral AAV | 1160 | WO2016154344A1 SEQ ID NO: 7 |
| ancestral AAV variant C4 | 1161 | WO2016154344A1 SEQ ID NO: 13 |
| ancestral AAV variant C7 | 1162 | WO2016154344A1 SEQ ID NO: 14 |
| ancestral AAV variant G4 | 1163 | WO2016154344A1 SEQ ID NO: 15 |
| consensus amino acid | 1164 | WO2016154344A1 SEQ ID NO: 16 |
| sequence of ancestral AAV | | |
| variants, C4, C7 and G4 | | |
| consensus amino acid | 1165 | WO2016154344A1 SEQ ID NO: 17 |
| sequence of ancestral AAV | | |
| variants, C4 and C7 | | |
| AAV8 (with a AAV2 | 1166 | WO2016150403A1 SEQ ID NO: 13 |
| phospholipase domain) | | |
| AAV VR-942n | 1167 | US20160289275A1 SEQ ID NO: 10 |
| AAV5-A (M569V) | 1168 | US20160289275A1 SEQ ID NO: 13 |
| AAV5-A (M569V) | 1169 | US20160289275A1 SEQ ID NO: 14 |
| AAV5-A (Y585V) | 1170 | US20160289275A1 SEQ ID NO: 16 |
| AAV5-A (Y585V) | 1171 | US20160289275A1 SEQ ID NO: 17 |
| AAV5-A (L587T) | 1172 | US20160289275A1 SEQ ID NO: 19 |
| AAV5-A (L587T) | 1173 | US20160289275A1 SEQ ID NO: 20 |
| AAV5-A (Y585V/L587T) | 1174 | US20160289275A1 SEQ ID NO: 22 |
| AAV5-A (Y585V/L587T) | 1175 | US20160289275A1 SEQ ID NO: 23 |
| AAV5-B (D652A) | 1176 | US20160289275A1 SEQ ID NO: 25 |
| AAV5-B (D652A) | 1177 | US20160289275A1 SEQ ID NO: 26 |
| AAV5-B (T362M) | 1178 | US20160289275A1 SEQ ID NO: 28 |
| AAV5-B (T362M) | 1179 | US20160289275A1 SEQ ID NO: 29 |
| AAV5-B (Q359D) | 1180 | US20160289275A1 SEQ ID NO: 31 |
| AAV5-B (Q359D) | 1181 | US20160289275A1 SEQ ID NO: 32 |
| AAV5-B (E350Q) | 1182 | US20160289275A1 SEQ ID NO: 34 |
| AAV5-B (E350Q) | 1183 | US20160289275A1 SEQ ID NO: 35 |
| AAV5-B (P533S) | 1184 | US20160289275A1 SEQ ID NO: 37 |
| AAV5-B (P533S) | 1185 | US20160289275A1 SEQ ID NO: 38 |
| AAV5-B (P533G) | 1186 | US20160289275A1 SEQ ID NO: 40 |
| AAV5-B (P533G) | 1187 | US20160289275A1 SEQ ID NO: 41 |
| AAV5-mutation in loop VII | 1188 | US20160289275A1 SEQ ID NO: 43 |
| AAV5-mutation in loop VII | 1189 | US20160289275A1 SEQ ID NO: 44 |
| AAV8 | 1190 | US20160289275A1 SEQ ID NO: 47 |
| Mut A (LK03/AAV8) | 1191 | WO2016181123A1 SEQ ID NO: 1 |
| Mut B (LK03/AAV5) | 1192 | WO2016181123A1 SEQ ID NO: 2 |
| Mut C (AAV8/AAV3B) | 1193 | WO2016181123A1 SEQ ID NO: 3 |
| Mut D (AAV5/AAV3B) | 1194 | WO2016181123A1 SEQ ID NO: 4 |
| Mut E (AAV8/AAV3B) | 1195 | WO2016181123A1 SEQ ID NO: 5 |
| Mut F (AAV3B/AAV8) | 1196 | WO2016181123A1 SEQ ID NO: 6 |
| AAV44.9 | 1197 | WO2016183297A1 SEQ ID NO: 4 |
| AAV44.9 | 1198 | WO2016183297A1 SEQ ID NO: 5 |
| AAVrh8 | 1199 | WO2016183297A1 SEQ ID NO: 6 |
| AAV44.9 (S470N) | 1200 | WO2016183297A1 SEQ ID NO: 9 |
| rh74 VP1 | 1201 | US20160375110A1 SEQ ID NO: 1 |
| AAV-LK03 (L125I) | 1202 | WO2017015102A1 SEQ ID NO: 5 |
| AAV3B (S663V + T492V) | 1203 | WO2017015102A1 SEQ ID NO: 6 |
| Anc80 | 1204 | WO2017019994A2 SEQ ID NO: 1 |
| Anc80 | 1205 | WO2017019994A2 SEQ ID NO: 2 |
| Anc81 | 1206 | WO2017019994A2 SEQ ID NO: 3 |
| Anc81 | 1207 | WO2017019994A2 SEQ ID NO: 4 |
| Anc82 | 1208 | WO2017019994A2 SEQ ID NO: 5 |
| Anc82 | 1209 | WO2017019994A2 SEQ ID NO: 6 |
| Anc83 | 1210 | WO2017019994A2 SEQ ID NO: 7 |
| Anc83 | 1211 | WO2017019994A2 SEQ ID NO: 8 |
| Anc84 | 1212 | WO2017019994A2 SEQ ID NO: 9 |
| Anc84 | 1213 | WO2017019994A2 SEQ ID NO: 10 |
| Anc94 | 1214 | WO2017019994A2 SEQ ID NO: 11 |
| Anc94 | 1215 | WO2017019994A2 SEQ ID NO: 12 |
| Anc113 | 1216 | WO2017019994A2 SEQ ID NO: 13 |
| Anc113 | 1217 | WO2017019994A2 SEQ ID NO: 14 |
| Anc126 | 1218 | WO2017019994A2 SEQ ID NO: 15 |
| Anc126 | 1219 | WO2017019994A2 SEQ ID NO: 16 |
| Anc127 | 1220 | WO2017019994A2 SEQ ID NO: 17 |
| Anc127 | 1221 | WO2017019994A2 SEQ ID NO: 18 |
| Anc80L27 | 1222 | WO2017019994A2 SEQ ID NO: 19 |
| Anc80L59 | 1223 | WO2017019994A2 SEQ ID NO: 20 |
| Anc80L60 | 1224 | WO2017019994A2 SEQ ID NO: 21 |
| Anc80L62 | 1225 | WO2017019994A2 SEQ ID NO: 22 |
| Anc80L65 | 1226 | WO2017019994A2 SEQ ID NO: 23 |
| Anc80L33 | 1227 | WO2017019994A2 SEQ ID NO: 24 |
| Anc80L36 | 1228 | WO2017019994A2 SEQ ID NO: 25 |
| Anc80L44 | 1229 | WO2017019994A2 SEQ ID NO: 26 |
| Anc80L1 | 1230 | WO2017019994A2 SEQ ID NO: 35 |
| Anc80L1 | 1231 | WO2017019994A2 SEQ ID NO: 36 |
| AAVrh10 | 1232 | WO2017019994A2 SEQ ID NO: 41 |
| Anc110 | 1233 | WO2017019994A2 SEQ ID NO: 42 |
| Anc110 | 1234 | WO2017019994A2 SEQ ID NO: 43 |
| AAVrh32.33 | 1235 | WO2017019994A2 SEQ ID NO: 45 |
| AAVrh74 | 1236 | WO2017049031A1 SEQ ID NO: 1 |
| AAV2 | 1237 | WO2017053629A2 SEQ ID NO: 49 |
| AAV2 | 1238 | WO2017053629A2 SEQ ID NO: 50 |
| AAV2 | 1239 | WO2017053629A2 SEQ ID NO: 82 |
| Parvo-like virus | 1240 | WO2017070476A2 SEQ ID NO: 1 |
| Parvo-like virus | 1241 | WO2017070476A2 SEQ ID NO: 2 |
| Parvo-like virus | 1242 | WO2017070476A2 SEQ ID NO: 3 |
| Parvo-like virus | 1243 | WO2017070476A2 SEQ ID NO: 4 |
| Parvo-like virus | 1244 | WO2017070476A2 SEQ ID NO: 5 |
| Parvo-like virus | 1245 | WO2017070476A2 SEQ ID NO: 6 |
| AAVrh.10 | 1246 | WO2017070516A1 SEQ ID NO: 7 |
| AAVrh.10 | 1247 | WO2017070516A1 SEQ ID NO: 14 |
| AAV2tYF | 1248 | WO2017070491A1 SEQ ID NO: 1 |
| AAV-SPK | 1249 | WO2017075619A1 SEQ ID NO: 28 |
| AAV2.5 | 1250 | US20170128528A1 SEQ ID NO: 13 |
| AAV1.1 | 1251 | US20170128528A1 SEQ ID NO: 15 |
| AAV6.1 | 1252 | US20170128528A1 SEQ ID NO: 17 |
| AAV6.3.1 | 1253 | US20170128528A1 SEQ ID NO: 18 |
| AAV2i8 | 1254 | US20170128528A1 SEQ ID NO: 28 |
| AAV2i8 | 1255 | US20170128528A1 SEQ ID NO: 29 |
| ttAAV | 1256 | US20170128528A1 SEQ ID NO: 30 |
| ttAAV-S312N | 1257 | US20170128528A1 SEQ ID NO: 32 |
| ttAAV-S312N | 1258 | US20170128528A1 SEQ ID NO: 33 |
| AAV6 (Y705, Y731, | 1259 | WO2016134337A1 SEQ ID NO: 24 |
| and T492) | | |
| AAV2 | 1260 | WO2016134375A1 SEQ ID NO: 9 |
| AAV2 | 1261 | WO2016134375A1 SEQ ID NO: 10 |

[0464] In some embodiments, the AAV serotype may be, or may have a sequence as described in International Patent Publication WO2015038958, the contents of which are herein incorporated by reference in their entirety, such as, but not limited to, AAV9 (SEQ ID NO: 2 and 11 of WO2015038958 or SEQ ID NO: 137 and 138 respectively herein), PHP.B (SEQ ID NO: 8 and 9 of WO2015038958, herein SEQ ID NO: 5 and 6), G2B-13 (SEQ ID NO: 12 of WO2015038958, herein SEQ ID NO: 7), G2B-26 (SEQ ID NO: 13 of WO2015038958, herein SEQ ID NO: 5), TH1.1-32 (SEQ ID NO: 14 of WO2015038958, herein SEQ ID NO: 8), TH1.1-35 (SEQ ID NO: 15 of WO2015038958, herein SEQ ID NO: 9) or variants thereof. Further, any of the targeting peptides or amino acid inserts described in WO2015038958, may be inserted into any parent AAV serotype, such as, but not limited to, AAV9 (SEQ ID NO: 137 for the DNA sequence and SEQ ID NO: 138 for the amino acid sequence). In another embodiment, the amino acid insert is inserted between amino acids 588-589 of the parent AAV sequence. The amino acid insert may be, but is not limited to, any of the following amino acid sequences, TLAVPFK (herein SEQ ID NO: 1262), KFPVALT (SEQ ID NO: 1263), LAVPFK (SEQ ID NO: 1264), AVPFK (SEQ ID NO: 1265), VPFK (SEQ ID NO: 1266), TLAVPF (SEQ ID NO: 1267), TLAVP (SEQ ID NO: 1268), TLAV (SEQ ID NO: 1269), SVSKPFL (SEQ ID NO: 1270), FTLTTPK (SEQ ID NO: 1271), MNATKNV (SEQ ID NO: 1272), QSSQTPR (SEQ ID NO: 1273), ILGTGTS (SEQ ID NO: 1274), TRTNPEA (SEQ ID NO: 1275), NGGTSSS (SEQ ID NO: 1276), or YTLSQGW (SEQ ID NO: 1277). Non-limiting examples of nucleotide sequences that may encode the amino acid inserts include the following, SEQ ID NO: 1278, SEQ ID NO: 1279, SEQ ID NO: 1280, SEQ ID NO: 1281, SEQ ID NO: 1282, SEQ ID NO: 1283, SEQ ID NO: 1284, SEQ ID NO: 1285, SEQ ID NO: 1286, or SEQ ID NO: 1287.

[0465] In some embodiments, the AAV serotype may be, or may have a sequence as described in International Patent Publication WO2017100671, the contents of which are herein incorporated by reference in their entirety, such as, but not limited to, AAV9 (SEQ ID NO: 45 of WO2017100671, herein SEQ ID NO: 11), PHP.N (SEQ ID NO: 46 of WO2017100671, herein SEQ ID NO: 4), PHP.S (SEQ ID NO: 47 of WO2017100671, herein SEQ ID NO: 10), or variants thereof. Further, any of the targeting peptides or amino acid inserts described in WO2017100671 may be inserted into any parent AAV serotype, such as, but not limited to, AAV9. In some embodiments, the amino acid insert is inserted between amino acids 586-592 of the parent AAV (e.g., AAV9). In another embodiment, the amino acid insert is inserted between amino acids 588-589 of the parent AAV sequence. The amino acid insert may be, but is not limited to, any of the following amino acid sequences, AQTLAVPFKAQ (SEQ ID NO: 1288), AQSVSKPFLAQ (SEQ ID NO: 1289), AQFTLTTPKAQ (SEQ ID NO: 1290), DGTLAVPFKAQ (SEQ ID NO: 1291), ESTLAVPFKAQ (SEQ ID NO: 1292), GGTLAVPFKAQ (SEQ ID NO: 1293), AQTLATPFKAQ (SEQ ID NO: 1294), ATTLATPFKAQ (SEQ ID NO: 1295), DGTLATPFKAQ (SEQ ID NO: 1296), GGTLATPFKAQ (SEQ ID NO: 1297), SGSLAVPFKAQ (SEQ ID NO: 1298), AQTLAQPFKAQ (SEQ ID NO: 1299), AQTLQQPFKAQ (SEQ ID NO: 1300), AQTLSNPFKAQ (SEQ ID NO: 1301), AQTLAVPFSNP (SEQ ID NO: 1302), QGTLAVPFKAQ (SEQ ID NO: 1303), NQTLAVPFKAQ (SEQ ID NO: 1304), EGSLAVPFKAQ (SEQ ID NO: 1305), SGNLAVPFKAQ (SEQ ID NO: 1306), EGTLAVPFKAQ (SEQ ID NO: 1307), DSTLAVPFKAQ (SEQ ID NO: 1308), AVTLAVPFKAQ (SEQ ID NO: 1309), AQTLSTPFKAQ (SEQ ID NO: 1310), AQTLPQPFKAQ (SEQ ID NO: 1311), AQTLSQPFKAQ (SEQ ID NO: 1312), AQTLQLPFKAQ (SEQ ID NO: 1313), AQTLTMPFKAQ (SEQ ID NO: 1314), AQTLTTPFKAQ (SEQ ID NO: 1315), AQYTLSQGWAQ (SEQ ID NO: 1316), AQMNATKNVAQ (SEQ ID NO: 1317), AQVSGGHHSAQ (SEQ ID NO: 1318), AQTLTAPFKAQ (SEQ ID NO: 1319), AQTLSKPFKAQ (SEQ ID NO: 1320), QAVRTSL (SEQ ID NO: 1321), YTLSQGW (SEQ ID NO: 1277), LAKERLS (SEQ ID NO: 1322), TLAVPFK (SEQ ID NO: 1262), SVSKPFL (SEQ ID NO: 1270), FTLTTPK (SEQ ID NO: 1271), MNSTKNV (SEQ ID NO: 1323), VSGGHHS (SEQ ID NO: 1324), SAQTLAVPFKAQAQ (SEQ ID NO: 1325), SXXXLAVPFKAQAQ (wherein X may be any amino acid; SEQ ID NO: 1326), SAQXXXVPFKAQAQ (wherein X may be any amino acid; SEQ ID NO: 1327), SAQTLXXXFKAQAQ (wherein X may be any amino acid; SEQ ID NO: 1328), SAQTLAVXXXAQAQ (wherein X may be any amino acid; SEQ ID NO: 1329), SAQTLAVPFXXXAQ (wherein X may be any amino acid; SEQ ID NO: 1330), TNHQSAQ (SEQ ID NO: 1331), AQAQTGW (SEQ ID NO: 1332), DGTLATPFK (SEQ ID NO: 1333), DGTLATPFKXX (wherein X may be any amino acid; SEQ ID NO: 1334), LAVPFKAQ (SEQ ID NO: 1335), VPFKAQ (SEQ ID NO: 1336), FKAQ (SEQ ID NO: 1337), AQTLAV (SEQ ID NO: 1338), AQTLAVPF (SEQ ID NO: 1339), QAVR (SEQ ID NO: 1340), AVRT (SEQ ID NO: 1341), VRTS (SEQ ID NO: 1342), RTSL (SEQ ID NO: 1343), QAVRT (SEQ ID NO: 1344), AVRTS (SEQ ID NO: 1345), VRTSL (SEQ ID NO: 1346), QAVRTS (SEQ ID NO: 1347), or AVRTSL (SEQ ID NO: 1348).Non-limiting examples of nucleotide sequences that may encode the amino acid inserts include the following, SEQ ID NO: 1349, SEQ ID NO: 1350, SEQ ID NO: 1351, SEQ ID NO: 1352, SEQ ID NO: 1353, SEQ ID NO: 1354, SEQ ID NO: 1355, SEQ ID NO: 1356, SEQ ID NO: 1357, SEQ ID NO: 1358 (wherein N may be A, C, T, or G), SEQ ID NO: 1359 (wherein N may be A, C, T, or G), SEQ ID NO: 1360 (wherein N may be A, C, T, or G), SEQ ID NO: 1361 (wherein N may be A, C, T, or G); herein SEQ ID NO: 1362 (wherein N may be A, C, T, or G), SEQ ID NO: 1279, SEQ ID NO: 1280, SEQ ID NO: 1281, SEQ ID NO: 1287, or SEQ ID NO: 1363.

[0466] In some embodiments, the AAV serotype may be, or may have a sequence as described in U.S. Pat. No. 9,624,274, the contents of which are herein incorporated by reference in their entirety, such as, but not limited to, AAV1 (SEQ ID NO: 181 of U.S. Pat. No. 9,624,274), AAV6 (SEQ ID NO: 182 of U.S. Pat. No. 9,624,274), AAV2 (SEQ ID NO: 183 of U.S. Pat. No. 9,624,274), AAV3b (SEQ ID NO: 184 of U.S. Pat. No. 9,624,274), AAV7 (SEQ ID NO: 185 of U.S. Pat. No. 9,624,274), AAV8 (SEQ ID NO: 186 of U.S. Pat. No. 9,624,274), AAV10 (SEQ ID NO: 187 of U.S. Pat. No. 9,624,274), AAV4 (SEQ ID NO: 188 of U.S. Pat. No. 9,624,274), AAV11 (SEQ ID NO: 189 of U.S. Pat. No. 9,624,274), bAAV (SEQ ID NO: 190 of U.S. Pat. No. 9,624,274), AAVS (SEQ ID NO: 191 of U.S. Pat. No. 9,624,274), GPV (SEQ ID NO: 192 of U.S. Pat. No. 9,624,274; herein SEQ ID NO: 879), B19 (SEQ ID NO: 193 of U.S. Pat. No. 9,624,274; herein SEQ ID NO: 880), MVM (SEQ ID NO: 194 of U.S. Pat. No. 9,624,274; herein SEQ ID NO: 881), FPV (SEQ ID NO: 195 of U.S. Pat. No. 9,624,274; herein SEQ ID NO: 882), CPV (SEQ ID NO: 196 of U.S. Pat. No. 9,624,274; herein SEQ ID NO: 883) or variants thereof. Further, any of the structural protein inserts described in U.S. Pat. No. 9,624,274, may be inserted into, but not limited to, 1-453 and 1-587 of any parent AAV serotype, such as, but not limited to, AAV2 (SEQ ID NO: 183 of U.S. Pat. No. 9,624,274). The amino acid insert may be, but is not limited to, any of the following amino acid sequences, VNLTWSRASG (SEQ ID NO: 1364), EFCINHRGYWVCGD (SEQ ID NO: 1365), EDGQVMDVDLS (SEQ ID NO: 1366), EKQRNGTLT (SEQ ID NO: 1367), TYQCRVTHPHLPRALMR (SEQ ID NO: 1368), RHSTTQPRKTKGSG (SEQ ID NO: 1369), DSNPRGVSAYLSR (SEQ ID NO: 1370), TITCLWDLAPSK (SEQ ID NO: 1371), KTKGSGFFVF (SEQ ID NO: 1372), THPHLPRALMRS (SEQ ID NO: 1373), GETYQCRVTHPHLPRALMRSTTK (SEQ ID NO: 1374), LPRALMRS (SEQ ID NO: 1375), INHRGYWV (SEQ ID NO: 1376), CDAGSVRTNAPD (SEQ ID NO: 1377), AKAVSNLTESRSESLQS (SEQ ID NO: 1378), SLTGDEFKKVLET (SEQ ID NO: 1379), REAVAYRFEED (SEQ ID NO: 1380), INPEIITLDG (SEQ ID NO: 1381), DISVTGAPVITATYL (SEQ ID NO: 1382), DISVTGAPVITA (SEQ ID NO: 1383), PKTVSNLTESSSESVQS (SEQ ID NO: 1384), SLMGDEFKAVLET (SEQ ID NO: 1385), QHSVAYTFEED (SEQ ID NO: 1386), INPEIITRDG (SEQ ID NO: 1387), DISLTGDPVITASYL (SEQ ID NO: 1388), DISLTGDPVITA (SEQ ID NO: 1389), DQSIDFEIDSA (SEQ ID NO: 1390), KNVSEDLPLPTFSPTLLGDS (SEQ ID NO: 1391), KNVSEDLPLPT (SEQ ID NO: 1392), CDSGRVRTDAPD (SEQ ID NO: 1393), FPEHLLVDFLQSLS (SEQ ID NO: 1394), DAEFRHDSG (SEQ ID NO: 1395), HYAAAQWDFGNTMCQL (SEQ ID NO: 1396), YAAQWDFGNTMCQ (SEQ ID NO: 1397), RSQKEGLHYT (SEQ ID NO: 1398), SSRTPSDKPVAHWANPQAE (SEQ ID NO: 1399), SRTPSDKPVAHWANP (SEQ ID NO: 1400), SSRTPSDKP (SEQ ID NO: 1401), NADGNVDYHMNSVP (SEQ ID NO: 1402), DGNVDYHMNSV (SEQ ID NO: 1403), RSFKEFLQSSLRALRQ (SEQ ID NO: 1404); FKEFLQSSLRA (SEQ ID NO: 1405), or QMWAPQWGPD (SEQ ID NO: 1406).

[0467] In some embodiments, the AAV serotype may be, or may have a sequence as described in U.S. Pat. No. 9,475,845, the contents of which are herein incorporated by reference in their entirety, such as, but not limited to, AAV capsid proteins comprising modification of one or more amino acids at amino acid positions 585 to 590 of the native AAV2 capsid protein. Further the modification may result in, but not be limited to, the amino acid sequence RGNRQA (SEQ ID NO: 1407), SSSTDP (SEQ ID NO: 1408), SSNTAP (SEQ ID NO: 1409), SNSNLP (herein SEQ ID NO: 1410), SSTTAP (SEQ ID NO: 1411), AANTAA (SEQ ID NO: 1412), QQNTAP (SEQ ID NO: 1413), SAQAQA (SEQ ID NO: 1414), QANTGP (SEQ ID NO: 1415), NATTAP (SEQ ID NO: 1416), SSTAGP (SEQ ID NO: 1417), QQNTAA (SEQ ID NO: 1418), PSTAGP (SEQ ID NO: 1419), NQNTAP (SEQ ID NO: 1420), QAANAP (SEQ ID NO: 1421), SIVGLP (SEQ ID NO: 1422), AASTAA (SEQ ID NO: 1423), SQNTTA (SEQ ID NO: 1424), QQDTAP (SEQ ID NO: 1425), QTNTGP (SEQ ID NO: 1426), QTNGAP (SEQ ID NO: 1427), QQNAAP (SEQ ID NO: 1428), or AANTQA (SEQ ID NO: 1429). In some embodiments, the amino acid modification is a substitution at amino acid positions 262 through 265 in the native AAV2 capsid protein or the corresponding position in the capsid protein of another AAV with a targeting sequence. The targeting sequence may be, but is not limited to, any of the amino acid sequences, NGRAHA (SEQ ID NO: 1430), QPEHSST (SEQ ID NO: 1431), VNTANST (SEQ ID NO: 1432), HGPMQKS (SEQ ID NO: 1433), PHKPPLA (SEQ ID NO: 1434), IKNNEMW (SEQ ID NO: 1435), RNLDTPM (SEQ ID NO: 1436), VDSHRQS (SEQ ID NO: 1437), YDSKTKT (SEQ ID NO: 1438), SQLPHQK (SEQ ID NO: 1439), STMQQNT (SEQ ID NO: 1440), TERYMTQ (SEQ ID NO: 1441), DASLSTS (SEQ ID NO: 1442), DLPNKKT (SEQ ID NO: 1443), DLTAARL (SEQ ID NO: 1444), EPHQFNY (SEQ ID NO: 1445), EPQSNHT (SEQ ID NO: 1446), MSSWPSQ (SEQ ID NO: 1447), NPKHNAT (SEQ ID NO: 1448), PDGMRTT (SEQ ID NO: 1449), PNNNKTT (SEQ ID NO: 1450), QSTTHDS (SEQ ID NO: 1451), TGSKQKQ (SEQ ID NO: 1452), SLKHQAL (SEQ ID NO: 1453), SPIDGEQ (SEQ ID NO: 1454), WIFPWIQL (SEQ ID NO: 1455), CDCRGDCFC (SEQ ID NO: 1456), CNGRC (SEQ ID NO: 1457), CPRECES (SEQ ID NO: 1458), CTTHWGFTLC (SEQ ID NO: 1459), CGRRAGGSC (SEQ ID NO: 1460), CKGGRAKDC (SEQ ID NO: 1461), CVPELGHEC (SEQ ID NO: 1462), CRRETAWAK (SEQ ID NO: 1463), VSWFSHRYSPFAVS (SEQ ID NO: 1464), GYRDGYAGPILYN (SEQ ID NO: 1465), XXXYXXX (SEQ ID NO: 1466), YXNW (SEQ ID NO: 1467), RPLPPLP (SEQ ID NO: 1468), APPLPPR (SEQ ID NO: 1469), DVFYPYPYASGS (SEQ ID NO: 1470), MYWYPY (SEQ ID NO: 1471), DITWDQLWDLMK (SEQ ID NO: 1472), CWDDXWLC (SEQ ID NO: 1473), EWCEYLGGYLRCYA (SEQ ID NO: 1474), YXCXXGPXTWXCXP (SEQ ID NO: 1475), IEGPTLRQWLAARA (SEQ ID NO: 1476), LWXXX (SEQ ID NO: 1477), XFXXYLW (SEQ ID NO: 1478), SSIISHFRWGLCD (SEQ ID NO: 1479), MSRPACPPNDKYE (SEQ ID NO: 1480), CLRSGRGC (SEQ ID NO: 1481), CHWMFSPWC (SEQ ID NO: 1482), WXXF (SEQ ID NO: 1483), CSSRLDAC (SEQ ID NO: 1484), CLPVASC (SEQ ID NO: 1485), CGFECVRQCPERC (SEQ ID NO: 1486), CVALCREACGEGC (SEQ ID NO: 1487), SWCEPGWCR (SEQ ID NO: 1488), YSGKWGW (SEQ ID NO: 1489), GLSGGRS (SEQ ID NO: 1490), LMLPRAD (SEQ ID NO: 1491), CSCFRDVCC (SEQ ID NO: 1492), CRDVVSVIC (SEQ ID NO: 1493), MARSGL (SEQ ID NO: 1494), MARAKE (SEQ ID NO: 1495), MSRTMS (SEQ ID NO: 1496, KCCYSL (SEQ ID NO: 1497), MYWGDSHWLQYWYE (SEQ ID NO: 1498), MQLPLAT (SEQ ID NO: 1499), EWLS (SEQ ID NO: 1500), SNEW (SEQ ID NO: 1501), TNYL (SEQ ID NO: 1502), WDLAWMFRLPVG (SEQ ID NO: 1503), CTVALPGGYVRVC (SEQ ID NO: 1504), CVAYCIEHHCWTC (SEQ ID NO: 1505), CVFAHNYDYLVC (SEQ ID NO: 1506), CVFTSNYAFC (SEQ ID NO: 1507), VHSPNKK (SEQ ID NO: 1508), CRGDGWC (SEQ ID NO: 1509), XRGCDX (SEQ ID NO: 1510), PXXX (SEQ ID NO: 1511), SGKGPRQITAL (SEQ ID NO: 1512), AAAAAAAAAXXXXX (SEQ ID NO: 1513), VYMSPF (SEQ ID NO: 1514), ATWLPPR (SEQ ID NO: 1515), HTMYYHHYQHHL (SEQ ID NO: 1516), SEVGCRAGPLQWLCEKYFG (SEQ ID NO: 1517), CGLLPVGRPDRNVWRWLC (SEQ ID NO: 1518), CKGQCDRFKGLPWEC (SEQ ID NO: 1519), SGRSA (SEQ ID NO: 1520), WGFP (SEQ ID NO: 1521), AEPMPHSLNFSQYLWYT (SEQ ID NO: 1522), WAYXSP (SEQ ID NO: 1523), IELLQAR (SEQ ID NO: 1524), AYTKCSRQWRTCMTTH (SEQ ID NO: 1525), PQNSKIPGPTFLDPH (SEQ ID NO: 1526), SMEPALPDWWWKMFK (SEQ ID NO: 1527), ANTPCGPYTHDCPVKR (SEQ ID NO: 1528), TACHQHVRMVRP (SEQ ID NO: 1529), VPWMEPAYQRFL (SEQ ID NO: 1530), DPRATPGS (SEQ ID NO: 1531), FRPNRAQDYNTN (SEQ ID NO: 1532), CTKNSYLMC (SEQ ID NO: 1533), CXXTXXXGXGC (SEQ ID NO: 1534), CPIEDRPMC (SEQ ID NO: 1535), HEWSYLAPYPWF (SEQ ID NO: 1536), MCPKHPLGC (SEQ ID NO: 1537), RMWPSSTVNLSAGRR (SEQ ID NO: 1538), SAKTAVSQRVWLPSHRGGEP (SEQ ID NO: 1539), KSREHVNNSACPSKRITAAL (SEQ ID NO: 1540), EGFR (SEQ ID NO: 1541), AGLGVR (SEQ ID NO: 1542), GTRQGHTMRLGVSDG (SEQ ID NO: 1543), IAGLATPGWSHWLAL (SEQ ID NO: 1544), SMSIARL (SEQ ID NO: 1545), HTFEPGV (SEQ ID NO: 1546), NTSLKRISNKRIRRK (SEQ ID NO: 1547), LRIKRKRRKRKKTRK (SEQ ID NO: 1548), GGG, GFS, LWS, EGG, LLV, LSP, LBS, AGG, GRR, GGH and GTV.

[0468] In some embodiments, the AAV serotype may be, or may have a sequence as described in United States Publication No. US 20160369298, the contents of which are herein incorporated by reference in their entirety, such as, but not limited to, site-specific mutated capsid protein of AAV2 (SEQ ID NO: 97 of US 20160369298; herein SEQ ID NO: 1549) or variants thereof, wherein the specific site is at least one site selected from sites R447, G453, S578, N587, N587+1, S662 of VP1 or fragment thereof.

[0469] Further, any of the mutated sequences described in US 20160369298, may be or may have, but not limited to, any of the following sequences SDSGASN (SEQ ID NO: 1550), SPSGASN (SEQ ID NO: 1551), SHSGASN (SEQ ID NO: 1552), SRSGASN (SEQ ID NO: 1553), SKSGASN (SEQ ID NO: 1554), SNSGASN (SEQ ID NO: 1555), SGSGASN (SEQ ID NO: 1556), SASGASN (SEQ ID NO: 1557), SESGTSN (SEQ ID NO: 1558), STTGGSN (SEQ ID NO: 1559), SSAGSTN (SEQ ID NO: 1560), NNDSQA (SEQ ID NO: 1561), NNRNQA (SEQ ID NO: 1562), NNNKQA (SEQ ID NO: 1563), NAKRQA (SEQ ID NO: 1564), NDEHQA (SEQ ID NO: 1565), NTSQKA (SEQ ID NO: 1566), YYLSRTNTPSGTDTQSRLVFSQAGA (SEQ ID NO: 1567), YYLSRTNTDSGTETQSGLDFSQAGA (SEQ ID NO: 1568), YYLSRTNTESGTPTQSALEFSQAGA (SEQ ID NO: 1569), YYLSRTNTHSGTHTQSPLHFSQAGA (SEQ ID NO: 1570), YYLSRTNTSSGTITISHLIFSQAGA (SEQ ID NO: 1571), YYLSRTNTRSGIMTKSSLMFSQAGA (SEQ ID NO: 1572), YYLSRTNTKSGRKTLSNLSFSQAGA (SEQ ID NO: 1573), YYLSRTNDGSGPVTPSKLRFSQRGA (SEQ ID NO: 1574), YYLSRTNAASGHATHSDLKFSQPGA (SEQ ID NO: 1575), YYLSRTNGQAGSLTMSELGFSQVGA (SEQ ID NO: 1576), YYLSRTNSTGGNQTTSQLLFSQLSA (SEQ ID NO: 1577), YFLSRTNNNTGLNTNSTLNFSQGRA (SEQ ID NO: 1578), SKTGADNNNSEYSWTG (SEQ ID NO: 1579), SKTDADNNNSEYSWTG (SEQ ID NO: 1580), SKTEADNNNSEYSWTG (SEQ ID NO: 1581), SKTPADNNNSEYSWTG (SEQ ID NO: 1582), SKTHADNNNSEYSWTG (SEQ ID NO: 1583), SKTQADNNNSEYSWTG (SEQ ID NO: 1584), SKTIADNNNSEYSWTG (SEQ ID NO: 1585), SKTMADNNNSEYSWTG (SEQ ID NO: 1586), SKTRADNNNSEYSWTG (SEQ ID NO: 1587), SKTNADNNNSEYSWTG (SEQ ID NO: 1588), SKTVGRNNNSEYSWTG (SEQ ID NO: 1589), SKTADRNNNSEYSWTG (SEQ ID NO: 1590), SKKLSQNNNSKYSWQG (SEQ ID NO: 1591), SKPTTGNNNSDYSWPG (SEQ ID NO: 1592), STQKNENNNSNYSWPG (SEQ ID NO: 1593), HKDDEGKF (SEQ ID NO: 1594), HKDDNRKF (SEQ ID NO: 1595), HKDDTNKF (SEQ ID NO: 1596), HEDSDKNF (SEQ ID NO: 1597), HRDGADSF (SEQ ID NO: 1598), HGDNKSRF (SEQ ID NO: 1599), KQGSEKTNVDFEEV (SEQ ID NO: 1600), KQGSEKTNVDSEEV (SEQ ID NO: 1601), KQGSEKTNVDVEEV (SEQ ID NO: 1602), KQGSDKTNVDDAGV (SEQ ID NO: 1603), KQGSSKTNVDPREV (SEQ ID NO: 1604), KQGSRKTNVDHKQV (SEQ ID NO: 1605), KQGSKGGNVDTNRV (SEQ ID NO: 1606), KQGSGEANVDNGDV (SEQ ID NO: 1607), KQDAAADNIDYDHV (SEQ ID NO: 1608), KQSGTRSNAAASSV (SEQ ID NO: 1609), KENTNTNDTELTNV (SEQ ID NO: 1610), QRGNNVAATADVNT (SEQ ID NO: 1611), QRGNNEAATADVNT (SEQ ID NO: 1612), QRGNNPAATADVNT (SEQ ID NO: 1613), QRGNNHAATADVNT (SEQ ID NO: 1614), QEENNIAATPGVNT (SEQ ID NO: 1615), QPPNNMAATHEVNT (SEQ ID NO: 1616), QHHNNSAATTIVNT (SEQ ID NO: 1617), QTTNNRAAFNMVET (SEQ ID NO: 1618), QKKNNNAASKKVAT (SEQ ID NO: 1619), QGGNNKAADDAVKT (SEQ ID NO: 1620), QAAKGGAADDAVKT (SEQ ID NO: 1621), QDDRAAAANESVDT (SEQ ID NO: 1622), QQQHDDAAYQRVHT (SEQ ID NO: 1623), QSSSSLAAVSTVQT (SEQ ID NO: 1624), QNNQTTAAIRNVTT (SEQ ID NO: 1625), NYNKKSDNVDFT (SEQ ID NO: 1626), NYNKKSENVDFT (SEQ ID NO: 1627), NYNKKSLNVDFT (SEQ ID NO: 1628), NYNKKSPNVDFT (SEQ ID NO: 1629), NYSKKSHCVDFT (SEQ ID NO: 1630), NYRKTIYVDFT (SEQ ID NO: 1631), NYKEKKDVHFT (SEQ ID NO: 1632), NYGHRAIVQFT (SEQ ID NO: 1633), NYANHQFVVCT (SEQ ID NO: 1634), NYDDDPTGVLLT (SEQ ID NO: 1635), NYDDPTGVLLT (SEQ ID NO: 1636), NFEQQNSVEWT (SEQ ID NO: 1637), SQSGASN (SEQ ID NO: 1638), NNGSQA (SEQ ID NO: 1639), YYLSRTNTPSGTTTWSRLQFSQAGA (SEQ ID NO: 1640), SKTSADNNNSEYSWTG (SEQ ID NO: 1641), HKDDEEKF (SEQ ID NO: 1642), KQGSEKTNVDIEEV (SEQ ID NO: 1643), QRGNNQAATADVNT (SEQ ID NO: 1644), NYNKKSVNVDFT (SEQ ID NO: 1645), SQSGASNYNTPSGTTTQSRLQFSTSADNNNSEYSWTGATKYH (SEQ ID NO: 1646), SAS GASNFNSEGGSLTQSSLGFSTDGENNNSDFSWTGATKYH (SEQ ID NO: 1647), SQSGASNYNTPSGTTTQSRLQFSTDGENNNSDFSWTGATKYH (SEQ ID NO: 1648), SASGASNYNTPSGTTTQSRLQFSTSADNNNSEFSWPGATTYH (SEQ ID NO: 1649), SQSGASNFNSEGGSLTQSSLGFSTDGENNNSDFSWTGATKYH (SEQ ID NO: 1650), SASGASNYNTPSGSLTQSSLGFSTDGENNNSDFSWTGATKYH (SEQ ID NO: 1651), SQSGASNYNTPSGTTTQSRLQFSTSADNNNSDFSWTGATKYH (SEQ ID NO: 1652), SGAGASNFNSEGGSLTQSSLGFSTDGENNNSDFSWTGATKYH (SEQ ID NO: 1653), SGAGASN (SEQ ID NO: 1654), NSEGGSLTQSSLGFS (SEQ ID NO: 1655), TDGENNNSDFS (SEQ ID NO: 1656), SEFSWPGATT (SEQ ID NO: 1657), TSADNNNSDFSWT (SEQ ID NO: 1658), SQSGASNY (SEQ ID NO: 1659), NTPSGTTTQSRLQFS (SEQ ID NO: 1660), TSADNNNSEYSWTGATKYH (SEQ ID NO: 1661), SASGASNF (SEQ ID NO: 1662), TDGENNNSDFSWTGATKYH (SEQ ID NO: 1663), SASGASNY (SEQ ID NO: 1664), TSADNNNSEFSWPGATTYH (SEQ ID NO: 1665), NTPSGSLTQSSLGFS (SEQ ID NO: 1666), TSADNNNSDFSWTGATKYH (SEQ ID NO: 1667), SGAGASNF (SEQ ID NO: 1668), CTCCAGVVSVVSMRSRVCVNSGCAGCTDHCVVSRNSGTCVMSACACAA (SEQ ID NO: 1669), CTCCAGAGAGGCAACAGACAAGCAGCTACCGCAGATGTCAACACACAA (SEQ ID NO: 1670), SAAGASN (SEQ ID NO: 1671), YFLSRTNTESGSTTQSTLRFSQAG (SEQ ID NO: 1672), SKTSADNNNSDFS (SEQ ID NO: 1673), KQGSEKTDVDIDKV (SEQ ID NO: 1674), STAGASN (SEQ ID NO: 1675), YFLSRTNTTSGIETQSTLRFSQAG (SEQ ID NO: 1676), SKTDGENNNSDFS (SEQ ID NO: 1677), KQGAAADDVEIDGV (SEQ ID NO: 1678), SEAGASN (SEQ ID NO: 1679), YYLSRTNTPSGTTTQSRLQFSQAG (SEQ ID NO: 1680), SKTSADNNNSEYS (SEQ ID NO: 1681), KQGSEKTNVDIEKV (SEQ ID NO: 1682), YFLSRTNDASGSDTKSTLLFSQAG (SEQ ID NO: 1683), STTPSENNNSEYS (SEQ ID NO: 1684), SAAGATN (SEQ ID NO: 1685), YFLSRTNGEAGSATLSELRFSQAG (SEQ ID NO: 1686), HGDDADRF (SEQ ID NO: 1687), KQGAEKSDVEVDRV (SEQ ID NO: 1688), KQDSGGDNIDIDQV (SEQ ID NO: 1689), SDAGASN (SEQ ID NO: 1690), YFLSRTNTEGGHDTQSTLRFSQAG (SEQ ID NO: 1691), KEDGGGSDVAIDEV (SEQ ID NO: 1692), SNAGASN (SEQ ID NO: 1693), and YFLSRTNGEAGSATLSELRFSQPG (SEQ ID NO: 1694). Non-limiting examples of nucleotide sequences that may encode the amino acid mutated sites include the following, SEQ ID NO: 1695, SEQ ID NO: 1696, SEQ ID NO: 1697, SEQ ID NO: 1698, SEQ ID NO: 1699, SEQ ID NO: 1700, SEQ ID NO: 1701, SEQ ID NO: 1702, SEQ ID NO: 1703, SEQ ID NO: 1704, SEQ ID NO: 1705, SEQ ID NO: 1706, SEQ ID NO: 1707, SEQ ID NO: 1708, SEQ ID NO: 1709, SEQ ID NO: 1710, AGCAGGAGCTCCTTGGCCTCAGCGTGCGAG (SEQ ID NO: 264 of US20160369298; herein SEQ ID NO: 1711), SEQ ID NO: 1712, SEQ ID NO: 1713, SEQ ID NO: 1714, SEQ ID NO: 1715, SEQ ID NO: 1716, and SEQ ID NO: 1717.

[0470] In some embodiments, the AAV serotype may comprise an ocular cell targeting peptide as described in International Patent Publication WO2016134375, the contents of which are herein incorporated by reference in their entirety, such as, but not limited to SEQ ID NO: 9, and SEQ ID NO:10 of WO2016134375. Further, any of the ocular cell targeting peptides or amino acids described in WO2016134375, may be inserted into any parent AAV serotype, such as, but not limited to, AAV2 (SEQ ID NO:8 of WO2016134375; herein SEQ ID NO: 1718), or AAV9 (SEQ ID NO: 11 of WO2016134375; herein SEQ ID NO: 1719). In some embodiments, modifications, such as insertions are made in AAV2 proteins at P34-A35, T138-A139, A139-P140, G453-T454, N587-R588, and/or R588-Q589. In certain embodiments, insertions are made at D384, G385, 1560, T561, N562, E563, E564, E565, N704, and/or Y705 of AAV9. The ocular cell targeting peptide may be, but is not limited to, any of the following amino acid sequences, GSTPPPM (SEQ ID NO: 1 of WO2016134375; herein SEQ ID NO: 1720), or GETRAPL (SEQ ID NO: 4 of WO2016134375; herein SEQ ID NO: 1721).

[0471] In some embodiments, the AAV serotype may be modified as described in the United States Publication US 20170145405 the contents of which are herein incorporated by reference in their entirety. AAV serotypes may include, modified AAV2 (e.g., modifications at Y444F, Y500F, Y730F and/or S662V), modified AAV3 (e.g., modifications at Y705F, Y731F and/or T492V), and modified AAV6 (e.g., modifications at S663V and/or T492V).

[0472] In some embodiments, the AAV serotype may be modified as described in the International Publication WO2017083722 the contents of which are herein incorporated by reference in their entirety. AAV serotypes may include, AAV1 (Y705+731F+T492V), AAV2 (Y444+500+730F+T491V), AAV3 (Y705+731F), AAV5, AAV 5(Y436+693+719F), AAV6 (VP3 variant Y705F/Y731F/T492V), AAV8 (Y733F), AAV9, AAV9 (VP3 variant Y731F), and AAV10 (Y733F).

[0473] In some embodiments, the AAV serotype may comprise, as described in International Patent Publication WO2017015102, the contents of which are herein incorporated by reference in their entirety, an engineered epitope comprising the amino acids SPAKFA (SEQ ID NO: 24 of WO2017015102; herein SEQ ID NO: 1722) or NKDKLN (SEQ ID NO:2 of WO2017015102; herein SEQ ID NO: 1723). The epitope may be inserted in the region of amino acids 665 to 670 based on the numbering of the VP1 capsid of AAV8 (SEQ ID NO: 3 of WO2017015102) and/or residues 664 to 668 of AAV3B (SEQ ID NO: 3).

[0474] In some embodiments, the AAV serotype may be, or may have a sequence as described in International Patent Publication WO2017058892, the contents of which are herein incorporated by reference in their entirety, such as, but not limited to, AAV variants with capsid proteins that may comprise a substitution at one or more (e.g., 2, 3, 4, 5, 6, or 7) of amino acid residues 262-268, 370-379, 451-459, 472-473, 493-500, 528-534, 547-552, 588-597, 709-710, 716-722 of AAV1, in any combination, or the equivalent amino acid residues in AAV2, AAV3, AAV4, AAV5, AAV6, AAV7, AAV8, AAV9, AAV10, AAV11, AAV12, AAVrh8, AAVrh10, AAVrh32.33, bovine AAV or avian AAV. The amino acid substitution may be, but is not limited to, any of the amino acid sequences described in WO2017058892. In some embodiments, the AAV may comprise an amino acid substitution at residues 256L, 258K, 259Q, 261S, 263A, 264S, 265T, 266G, 272H, 385S, 386Q, S472R, V473D, N500E 547S, 709A, 710N, 716D, 717N, 718N, 720L, A456T, Q457T, N458Q, K459S, T492S, K493A, S586R, S587G, S588N, T589R and/or 722T of AAV1 (SEQ ID NO: 1 of WO2017058892) in any combination, 244N, 246Q, 248R, 249E, 2501, 251K, 252S, 253G, 254S, 255V, 256D, 263Y, 377E, 378N, 453L, 456R, 532Q, 533P, 535N, 536P, 537G, 538T, 539T, 540A, 541T, 542Y, 543L, 546N, 653V, 654P, 656S, 697Q, 698F, 704D, 705S, 706T, 707G, 708E, 709Y and/or 710R of AAV5 (SEQ ID NO:5 of WO2017058892) in any combination, 248R, 316V, 317Q, 318D, 319S, 443N, 530N, 531S, 532Q 533P, 534A, 535N, 540A, 541 T, 542Y, 543L, 545G, 546N, 697Q, 704D, 706T, 708E, 709Y and/or 710R of AAV5 (SEQ ID NO: 5 of WO2017058892) in any combination, 264S, 266G, 269N, 272H, 457Q, 588S and/or 5891 of AAV6 (SEQ ID NO:6 of WO2017058892) in any combination, 457T, 459N, 496G, 499N, 500N, 589Q, 590N and/or 592A of AAV8 (SEQ ID NO: 8 of WO2017058892) in any combination, 451I, 452N, 453G, 454S, 455G, 456Q, 457N and/or 458Q of AAV9 (SEQ ID NO: 9 of WO2017058892) in any combination.

[0475] In some embodiments, the AAV may include a sequence of amino acids at positions 155, 156 and 157 of VP1 or at positions 17, 18, 19 and 20 of VP2, as described in International Publication No. WO 2017066764, the contents of which are herein incorporated by reference in their entirety. The sequences of amino acid may be, but not limited to, N—S—S, S—X—S, S—S—Y, N—X—S, N—S—Y, S—X—Y and N—X—Y, where N, X and Y are, but not limited to, independently non-serine, or non-threonine amino acids, wherein the AAV may be, but not limited to AAV1, AAV2, AAV3, AAV4, AAV5, AAV6, AAV7, AAV8, AAV9, AAV10, AAV11 and AAV12. In some embodiments, the AAV may include a deletion of at least one amino acid at positions 156, 157 or 158 of VP1 or at positions 19, 20 or 21 of VP2, wherein the AAV may be, but not limited to AAV1, AAV2, AAV3, AAV4, AAV5, AAV6, AAV7, AAV8, AAV9, AAV10, AAV11 and AAV12.

[0476] In some embodiments, the AAV may be a serotype generated by Cre-recombination-based AAV targeted evolution (CREATE) as described by Deverman et al., (Nature Biotechnology 34(2):204-209 (2016)), the contents of which are herein incorporated by reference in their entirety. In some embodiments, AAV serotypes generated in this manner have improved CNS transduction and/or neuronal and astrocytic tropism, as compared to other AAV serotypes. As non-limiting examples, the AAV serotype may include a peptide such as, but not limited to, PHP.B, PHP.B2, PHP.B3, PHP.A, PHP.S, G2A12, G2A15, G2A3, G2B4, and G2B5. In some embodiments, these AAV serotypes may be AAV9 (SEQ ID NO: 11 or 138) derivatives with a 7-amino acid insert between amino acids 588-589. Non-limiting examples of these 7-amino acid inserts include TLAVPFK (PHP.B; SEQ ID NO: 1262), SVSKPFL (PHP.B2; SEQ ID NO: 1270), FTLTTPK (PHP.B3; SEQ ID NO: 1271), YTLSQGW (PHP.A; SEQ ID NO: 1277), QAVRTSL (PHP.S; SEQ ID NO: 1321), LAKERLS (G2A3; SEQ ID NO: 1322), MNSTKNV (G2B4; SEQ ID NO: 1323), and/or VSGGHHS (G2B5; SEQ ID NO: 1324).

[0477] In some embodiments, the AAV serotype may be as described in Jackson et al (Frontiers in Molecular Neuroscience 9:154 (2016)), the contents of which are herein incorporated by reference in their entirety. In some embodiments, the AAV serotype is PHP.B or AAV9. In some embodiments, the AAV serotype is paired with a synapsin promoter to enhance neuronal transduction, as compared to when more ubiquitous promoters are used (e.g., CBA or CMV).

[0478] In some embodiments, the AAV serotype is a serotype comprising the AAVPHP.N (PHP.N) peptide, or a variant thereof. In some embodiments the AAV serotype is a serotype comprising the AAVPHP.B (PHP.B) peptide, or a variant thereof. In some embodiments, the AAV serotype is a serotype comprising the AAVPHP.A (PHP.A) peptide, or a variant thereof. In some embodiments, the AAV serotype is a serotype comprising the PHP.S peptide, or a variant thereof. In some embodiments, the AAV serotype is a serotype comprising the PHP.B2 peptide, or a variant thereof. In some embodiments, the AAV serotype is a serotype comprising the PHP.B3 peptide, or a variant thereof. In some embodiments, the AAV serotype is a serotype comprising the G2B4 peptide, or a variant thereof. In some embodiments, the AAV serotype is a serotype comprising the G2B5 peptide, or a variant thereof. In some embodiments the AAV serotype is VOY101, or a variant thereof. In some embodiments, the AAV serotype is VOY201, or a variant thereof.

[0479] In some embodiments the AAV serotype of an AAV particle, e.g., an AAV particle for the vectorized delivery of a GBA protein described herein, is AAV9, or a variant thereof. In some embodiments, the AAV particle, e.g., a recombinant AAV particle described herein, comprises an AAV9 capsid protein. In some embodiments, the AAV9 capsid protein comprises the amino acid sequence of SEQ ID NO: 138. In some embodiments, the nucleic acid sequence encoding the AAV9 capsid protein comprises the nucleotide sequence of SEQ ID NO: 137. In some embodiments, the AAV9 capsid protein comprises an amino acid sequence at least 70% identical to SEQ ID NO: 138, such as, 70%, 75%, 80%, 85%, 90%, 91%, 92%, 93%, 94%, 95%, 96%, 97%, 98%, 99%, or greater than 99%. In some embodiments, the nucleic acid sequence encoding the AAV9 capsid protein comprises a nucleotide sequence at least 70% identical to SEQ ID NO: 137, such as, 70%, 75%, 80%, 85%, 90%, 91%, 92%, 93%, 94%, 95%, 96%, 97%, 98%, 99%, or greater than 99%.

[0480] In some embodiments, the capsid protein comprises the amino acid sequence of SEQ ID NO: 11 or an amino acid sequence substantially identical (e.g., having at least 70%, 75%, 80%, 85%, 90%, 92%, 95%, 97%, 98%, or 99% sequence identity) thereto. In some embodiments the capsid protein comprises an amino acid sequence comprising at least one, two, or three modifications but no more than 30, 20, or 10 modifications, e.g., substitutions, relative to the amino acid sequence of SEQ ID NO: 11, optionally provided that position 449 does not comprise K, e.g., is R.

[0481] In some embodiments, the capsid protein, comprises the amino acid sequence of SEQ ID NO: 1 or an amino acid sequence substantially identical (e.g., having at least 70%, 75%, 80%, 85%, 90%, 92%, 95%, 97%, 98%, or 99% sequence identity) thereto. In some embodiments the capsid protein comprises an amino acid sequence comprising at least one, two, or three modifications but no more than 30, 20, or 10 modifications, e.g., substitutions, relative to the amino acid sequence of SEQ ID NO: 1. In some embodiments, the capsid protein comprises an amino acid sequence encoded by the nucleotide sequence of SEQ ID NO: 2 or a nucleotide sequence substantially identical (e.g., having at least 70%, 75%, 80%, 85%, 90%, 92%, 95%, 97%, 98%, or 99% sequence identity) thereto. In some embodiments, the nucleotide sequence encoding the capsid protein comprises the nucleotide sequence of SEQ ID NO: 2 or a sequence substantially identical (e.g., having at least 70%, 75%, 80%, 85%, 90%, 92%, 95%, 97%, 98%, or 99% sequence identity) thereto.

[0482] In some embodiments, the capsid protein, e.g., an AAV9 capsid protein, comprises the amino acid sequence of SEQ ID NO: 138 or an amino acid sequence substantially identical (e.g., having at least 70%, 75%, 80%, 85%, 90%, 92%, 95%, 97%, 98%, or 99% sequence identity) thereto. In some embodiments the capsid protein comprises an amino acid sequence comprising at least one, two, or three modifications but no more than 30, 20, or 10 modifications, e.g., substitutions, relative to the amino acid sequence of SEQ ID NO: 138. In some embodiments, the capsid protein comprises an amino acid sequence encoded by the nucleotide sequence of SEQ ID NO: 137 or a nucleotide sequence substantially identical (e.g., having at least 70%, 75%, 80%, 85%, 90%, 92%, 95%, 97%, 98%, or 99% sequence identity) thereto. In some embodiments, the nucleotide sequence encoding the capsid protein comprises the nucleotide sequence of SEQ ID NO: 137 or a nucleotide sequence substantially identical (e.g., having at least 70%, 75%, 80%, 85%, 90%, 92%, 95%, 97%, 98%, or 99% sequence identity) thereto. In some embodiments, the capsid protein comprises substitution at position K449, e.g., a K449R substitution, numbered according to SEQ ID NO: 138.

[0483] In some embodiments, the capsid protein comprises an insert comprising the amino acid sequence of TLAVPFK (SEQ ID NO: 1262). In some embodiments, the insert is present immediately subsequent to position 588, relative to a reference sequence numbered according to SEQ ID NO: 138. In some embodiments, the capsid protein comprises the amino acid substitutions of A587D and Q588G, numbered according to SEQ ID NO: 138.

[0484] In some embodiments, the capsid protein comprises the amino acid substitution of K449R, numbered according to SEQ ID NO: 138; and an insert comprising the amino acid sequence of TLAVPFK (SEQ ID NO: 1262), wherein the insert is present immediately subsequent to position 588, relative to a reference sequence numbered according to SEQ ID NO: 138.

[0485] In some embodiments, the capsid protein comprises the amino acid substitution of K449R, numbered according to SEQ ID NO: 138; an insert comprising the amino acid sequence of TLAVPFK (SEQ ID NO: 1262), wherein the insert is present immediately subsequent to position 588, relative to a reference sequence numbered according to SEQ ID NO: 138; and the amino acid substitutions of A587D and Q588G, numbered according to SEQ ID NO: 138.

[0486] In some embodiments, the capsid protein comprises an insert comprising the amino acid sequence of TLAVPFK (SEQ ID NO: 1262), wherein the insert is present immediately subsequent to position 588, relative to a reference sequence numbered according to SEQ ID NO: 138; and the amino acid substitutions of A587D and Q588G, numbered according to SEQ ID NO: 138.

[0487] In some embodiments, the AAV serotype of the AAV particle, e.g., an AAV particle for the vectorized delivery of antibody molecule described herein (e.g., an anti-beta-amyloid antibody molecule), is an AAV9 K449R, or a variant thereof. In some embodiments, the AAV particle comprises an AAV9 K449 capsid protein. In some embodiments, the AAV9 K449R capsid protein comprises the amino acid sequence of SEQ ID NO: 11. In some embodiments, the AAV9 K449R capsid protein comprises an amino acid sequence at least 70% identical to SEQ ID NO: 11, such as, 70%, 75%, 80%, 85%, 90%, 91%, 92%, 93%, 94%, 95%, 96%, 97%, 98%, 99%, or greater than 99%.

[0488] In some embodiments, the AAV capsid of an AAV particle, e.g., an AAV particle for the vectorized delivery of a GBA protein described herein, allows for blood brain barrier penetration following intravenous administration. Non-limiting examples of such AAV capsids include AAV9, AAV9 K449R, VOY101, VOY201, or AAV capsids comprising a peptide insert such as, but not limited to, AAVPHP.N (PHP.N), AAVPHP.B (PHP.B), PHP.S, G2A3, G2B4, G2B5, G2A12, G2A15, PHP.B2, PHP.B3, AAV2.BR1, or AAVPHP.A (PHP.A).

[0489] In some embodiments, the AAV serotype is selected for use due to its tropism for cells of the central nervous system. In some embodiments, the cells of the central nervous system are neurons. In another embodiment, the cells of the central nervous system are astrocytes.

[0490] In some embodiments, the AAV serotype is selected for use due to its tropism for cells of the muscle(s).

[0491] In some embodiments, the initiation codon for translation of the AAV VP1 capsid protein may be CTG, TTG, or GTG as described in U.S. Pat. No. 8,163,543, the contents of which are herein incorporated by reference in their entirety. In some embodiments, the nucleotide sequence encoding the capsid protein, e.g., a VP1 capsid protein, comprises 3-20 mutations (e.g., substitutions), e.g., 3-15 mutations, 3-10 mutations, 3-5 mutations, 5-20 mutations, 5-15 mutations, 5-10 mutations, 10-20 mutations, 10-15 mutations, 15-20 mutations, 3 mutations, 5 mutations, 10 mutations, 12 mutations, 15 mutations, 18 mutations, or 20 mutations, relative to the nucleotide sequence of SEQ ID NO: 137.

[0492] The present disclosure refers to structural capsid proteins (including VP1, VP2 and VP3) which are encoded by capsid (Cap) genes. These capsid proteins form an outer protein structural shell (i.e. capsid) of a viral vector such as AAV. VP capsid proteins synthesized from Cap polynucleotides generally include a methionine as the first amino acid in the peptide sequence (Met1), which is associated with the start codon (AUG or ATG) in the corresponding Cap nucleotide sequence. However, it is common for a first-methionine (Met1) residue or generally any first amino acid (AA1) to be cleaved off after or during polypeptide synthesis by protein processing enzymes such as Met-aminopeptidases. This “Met/AA-clipping” process often correlates with a corresponding acetylation of the second amino acid in the polypeptide sequence (e.g., alanine, valine, serine, threonine, etc.). Met-clipping commonly occurs with VP1 and VP3 capsid proteins but can also occur with VP2 capsid proteins.

[0493] Where the Met/AA-clipping is incomplete, a mixture of one or more (one, two or three) VP capsid proteins comprising the viral capsid may be produced, some of which may include a Met1/AA1 amino acid (Met+/AA+) and some of which may lack a Met1/AA1 amino acid as a result of Met/AA-clipping (Met−/AA−). For further discussion regarding Met/AA-clipping in capsid proteins, see Jin, et al. Direct Liquid Chromatography/Mass Spectrometry Analysis for Complete Characterization of Recombinant Adeno-Associated Virus Capsid Proteins. Hum Gene Ther Methods. 2017 Oct. 28(5):255-267; Hwang, et al. N-Terminal Acetylation of Cellular Proteins Creates Specific Degradation Signals. Science. 2010 Feb. 19. 327(5968): 973-977; the contents of which are each incorporated herein by reference in their entirety.

[0494] According to the present disclosure, references to capsid proteins is not limited to either clipped (Met−/AA−) or unclipped (Met+/AA+) and may, in context, refer to independent capsid proteins, viral capsids comprised of a mixture of capsid proteins, and/or polynucleotide sequences (or fragments thereof) which encode, describe, produce or result in capsid proteins of the present disclosure. A direct reference to a “capsid protein” or “capsid polypeptide” (such as VP1, VP2 or VP2) may also comprise VP capsid proteins which include a Met1/AA1 amino acid (Met+/AA+) as well as corresponding VP capsid proteins which lack the Met1/AA1 amino acid as a result of Met/AA-clipping (Met−/AA−).

[0495] Further according to the present disclosure, a reference to a specific “SEQ ID NO:” (whether a protein or nucleic acid) which comprises or encodes, respectively, one or more capsid proteins which include a Met1/AA1 amino acid (Met+/AA+) should be understood to teach the VP capsid proteins which lack the Met1/AA1 amino acid as upon review of the sequence, it is readily apparent any sequence which merely lacks the first listed amino acid (whether or not Met1/AA1).

[0496] As a non-limiting example, reference to a VP1 polypeptide sequence which is 736 amino acids in length and which includes a “Met 1” amino acid (Met+) encoded by the AUG/ATG start codon may also be understood to teach a VP1 polypeptide sequence which is 735 amino acids in length and which does not include the “Met1” amino acid (Met−) of the 736 amino acid Met+sequence. As a second non-limiting example, reference to a VP1 polypeptide sequence which is 736 amino acids in length and which includes an “AA1” amino acid (AA1+) encoded by any NNN initiator codon may also be understood to teach a VP1 polypeptide sequence which is 735 amino acids in length and which does not include the “AA1” amino acid (AA1-) of the 736 amino acid AA1+sequence.

[0497] References to viral capsids formed from VP capsid proteins (such as reference to specific AAV capsid serotypes), can incorporate VP capsid proteins which include a Met1/AA1 amino acid (Met+/AA1+), corresponding VP capsid proteins which lack the Met1/AA1 amino acid as a result of Met/AA1-clipping (Met−/AA1-), and combinations thereof (Met+/AA1+ and Met−/AA1-).

[0498] As a non-limiting example, an AAV capsid serotype can include VP1 (Met+/AA1+), VP1 (Met−/AA1-), or a combination of VP1 (Met+/AA1+) and VP1 (Met−/AA1-). An AAV capsid serotype can also include VP3 (Met+/AA1+), VP3 (Met−/AA1-), or a combination of VP3 (Met+/AA1+) and VP3 (Met−/AA1-); and can also include similar optional combinations of VP2 (Met+/AA1) and VP2 (Met−/AA1-).

### AAV Viral Genome

[0499] In some aspects, the AAV particle of the present disclosure serves as an expression vector comprising a viral genome which encodes a GCase protein. The viral genome can encode a GCase protein and an enhancement, e.g., prosaposin (PSAP) or sapsosin (Sap) polypeptide or functional variant thereof (e.g., a SapA protein or a SapC protein), a cell penetrating peptide (e.g., an ApoEII peptide, a TAT peptide, or an ApoB peptide), a lysosomal targeting sequence (LTS), or a combination thereof. In some embodiments, expression vectors are not limited to AAV and may be adenovirus, retrovirus, lentivirus, plasmid, vector, or any variant thereof.

[0500] In some embodiments, an AAV particle, e.g., an AAV particle for the vectorized delivery of anGBA protein described herein, comprises a viral genome, e.g., an AAV viral genome (e.g., a vector genome or AAV vector genome). In some embodiments, the viral genome, e.g., the AAV viral genome, further comprises an inverted terminal repeat (ITR) region, an enhancer, a promoter, an intron region, a Kozak sequence, an exon region, a nucleic acid encoding a transgene encoding a payload (e.g., a GBA protein described herein) with or without an enhancement element, a nucleotide sequence encoding a miR binding site (e.g., a miR183 binding site), a poly A signal region, or a combination thereof.

### Viral Genome Component: Inverted Terminal Repeats (ITRs)

[0501] In some embodiments, the viral genome may comprise at least one inverted terminal repeat (ITR) region. The AAV particles of the present disclosure comprise a viral genome with at least one ITR region and a payload region. In some embodiments, the viral genome has two ITRs. These two ITRs flank the payload region at the 5′ and 3′ ends. In some embodiments, the ITR functions as an origin of replication comprising a recognition site for replication. In some embodiments, the ITR comprises a sequence region which can be complementary and symmetrically arranged. In some embodiments, the ITR incorporated into a viral genome described herein may be comprised of a naturally occurring polynucleotide sequence or a recombinantly derived polynucleotide sequence.

[0502] The ITRs may be derived from the same serotype as the capsid, selected from any of the serotypes listed in Table 1, or a derivative thereof. The ITR may be of a different serotype than the capsid. In some embodiments, the AAV particle has more than one ITR. In a non-limiting example, the AAV particle has a viral genome comprising two ITRs. In some embodiments, the ITRs are of the same serotype as one another. In another embodiment, the ITRs are of different serotypes. Non-limiting examples include zero, one or both of the ITRs having the same serotype as the capsid. In some embodiments both ITRs of the viral genome of the AAV particle are AAV2 ITRs.

[0503] Independently, each ITR may be about 100 to about 150 nucleotides in length. In some embodiments, the ITR comprises 100-180 nucleotides in length, e.g., about 100-115, about 100-120, about 100-130, about 100-140, about 100-150, about 100-160, about 100-170, about 100-180, about 110-120, about 110-130, about 110-140, about 110-150, about 110-160, about 110-170, about 110-180, about 120-130, about 120-140, about 120-150, about 120-160, about 120-170, about 120-180, about 130-140, about 130-150, about 130-160, about 130-170, about 130-180, about 140-150, about 140-160, about 140-170, about 140-180, about 150-160, about 150-170, about 150-180, about 160-170, about 160-180, or about 170-180 nucleotides in length. In some embodiments, the ITR comprises about 120-140 nucleotides in length, e.g., about 130 nucleotides in length. In some embodiments, the ITRs are 140-142 nucleotides in length, e.g., 141 nucleotides in length. In some embodiments, the ITR comprises 1205-135 nucleotides in length, e.g., 130 nucleotides in length. Non-limiting examples of ITR length are 102, 130, 140, 141, 142, 145 nucleotides in length, and those having at least 95% identity thereto.

[0504] In some embodiments, each ITR may be 141 nucleotides in length. In some embodiments, each ITR may be 130 nucleotides in length. In some embodiments, the AAV particles comprise two ITRs and one ITR is 141 nucleotides in length and the other ITR is 130 nucleotides in length.

[0505] In some embodiments, the ITR comprises the nucleotide sequence of any one of SEQ ID NOs: 1829, 1830, or 1862, or a nucleotide sequence substantially identical (e.g., at least 70%, 75%, 80%, 85%, 90%, 95%, 99% or 100% identical) to any of the aforesaid sequences. In some embodiments, the ITR comprises the nucleotide sequence of any of SEQ ID NOs: 1860, 1861, 1863, or 1864, or a nucleotide sequence having one, two, or three but no more than four modifications, e.g., substitutions, relative to SEQ ID NOs: 1860, 1861, 1863, or 1864.

### Viral Genome Component: Promoters and Expression Enhancers

[0506] In some embodiments, the payload region of the viral genome comprises at least one element to enhance the transgene target specificity and expression. See, e.g., Powell et al. Viral Expression Cassette Elements to Enhance Transgene Target Specificity and Expression in Gene Therapy, 2015; the contents of which are herein incorporated by reference in their entirety. Non-limiting examples of elements to enhance the transgene target specificity and expression include promoters, endogenous miRNAs, post-transcriptional regulatory elements (PREs), polyadenylation (PolyA) signal sequences, upstream enhancers (USEs), CMV enhancers, and introns.

[0507] In some embodiments, expression of the polypeptides in a target cell may be driven by a specific promoter, including but not limited to, a promoter that is species specific, inducible, tissue-specific, or cell cycle-specific (Parr et al., Nat. Med.3:1145-9 (1997); the contents of which are herein incorporated by reference in their entirety).

[0508] In some embodiments, the viral genome comprises a that is sufficient for expression, e.g., in a target cell, of a payload (e.g., a GBA protein) encoded by a transgene. In some embodiments, the promoter is deemed to be efficient when it drives expression of the polypeptide(s) encoded in the payload region of the viral genome of the AAV particle.

[0509] In some embodiments, the promoter is a promoter deemed to be efficient when it drives expression in the cell or tissue being targeted.

[0510] In some embodiments, the promoter drives expression of the GCase, GCase and SapA, or GCase and SapC protein(s) for a period of time in targeted tissues. Expression driven by a promoter may be for a period of 1 hour, 2, hours, 3 hours, 4 hours, 5 hours, 6 hours, 7 hours, 8 hours, 9 hours, 10 hours, 11 hours, 12 hours, 13 hours, 14 hours, 15 hours, 16 hours, 17 hours, 18 hours, 19 hours, 20 hours, 21 hours, 22 hours, 23 hours, 1 day, 2 days, 3 days, 4 days, 5 days, 6 days, 1 week, 8 days, 9 days, 10 days, 11 days, 12 days, 13 days, 2 weeks, 15 days, 16 days, 17 days, 18 days, 19 days, 20 days, 3 weeks, 22 days, 23 days, 24 days, 25 days, 26 days, 27 days, 28 days, 29 days, 30 days, 31 days, 1 month, 2 months, 3 months, 4 months, 5 months, 6 months, 7 months, 8 months, 9 months, 10 months, 11 months, 1 year, 13 months, 14 months, 15 months, 16 months, 17 months, 18 months, 19 months, 20 months, 21 months, 22 months, 23 months, 2 years, 3 years, 4 years, 5 years, 6 years, 7 years, 8 years, 9 years, 10 years or more than 10 years. Expression may be for 1-5 hours, 1-12 hours, 1-2 days, 1-5 days, 1-2 weeks, 1-3 weeks, 1-4 weeks, 1-2 months, 1-4 months, 1-6 months, 2-6 months, 3-6 months, 3-9 months, 4-8 months, 6-12 months, 1-2 years, 1-5 years, 2-5 years, 3-6 years, 3-8 years, 4-8 years, or 5-10 years.

[0511] In some embodiments, the promoter drives expression of a polypeptide (e.g., a GCase polypeptide, a GCase polypeptide and a prosaposin (PSAP) polypeptide, a GCase polypeptide and a SapA polypeptide, a GCase polypeptide and a SapC polypeptide, a GCase polypeptide and a cell penetrating peptide (e.g., an ApoEII peptide, a TAT peptide, and/or a ApoB peptide), or a GCase polypeptide and a lysosomal targeting peptide) for at least 1 month, 2 months, 3 months, 4 months, 5 months, 6 months, 7 months, 8 months, 9 months, 10 months, 11 months, 1 year, 2 years, 3 years 4 years, 5 years, 6 years, 7 years, 8 years, 9 years, 10 years, 11 years, 12 years, 13 years, 14 years, 15 years, 16 years, 17 years, 18 years, 19 years, 20 years, 21 years, 22 years, 23 years, 24 years, 25 years, 26 years, 27 years, 28 years, 29 years, 30 years, 31 years, 32 years, 33 years, 34 years, 35 years, 36 years, 37 years, 38 years, 39 years, 40 years, 41 years, 42 years, 43 years, 44 years, 45 years, 46 years, 47 years, 48 years, 49 years, 50 years, 55 years, 60 years, 65 years, or more than 65 years.

[0512] Promoters may be naturally occurring or non-naturally occurring. Non-limiting examples of promoters include viral promoters, plant promoters and mammalian promoters. In some embodiments, the promoters may be human promoters. In some embodiments, the promoter may be truncated.

[0513] In some embodiments, the viral genome comprises a promoter that results in expression in one or more, e.g., multiple, cells and/or tissues, e.g., a ubiquitous promoter. In some embodiments, a promoter which drives or promotes expression in most mammalian tissues includes, but is not limited to, human elongation factor 1α-subunit (EF1α), cytomegalovirus (CMV) immediate-early enhancer and/or promoter, chicken β-actin (CBA) and its derivative CAG, 0 glucuronidase (GUSB), and ubiquitin C (UBC). Tissue-specific expression elements can be used to restrict expression to certain cell types such as, but not limited to, CNS-specific promoters, B cell promoters, monocyte promoters, leukocyte promoters, macrophage promoters, pancreatic acinar cell promoters, endothelial cell promoters, lung tissue promoters, astrocyte promoters, or various specific nervous system cell- or tissue-type promoters which can be used to restrict expression to neurons, astrocytes, or oligodendrocytes, for example.

[0514] In some embodiments, the viral genome comprises a nervous system specific promoter, e.g., a promoter that results in expression of a payload in a neuron, an astrocyte, and/or an oligodendrocyte. Non-limiting examples of tissue-specific expression elements for neurons include neuron-specific enolase (NSE), platelet-derived growth factor (PDGF), platelet-derived growth factor B-chain (PDGF-β), synapsin (Syn), synapsin 1 (Synl), methyl-CpG binding protein 2 (MeCP2), Ca²⁺/calmodulin-dependent protein kinase II (CaMKII), metabotropic glutamate receptor 2 (mGluR2), neurofilament light (NFL) or heavy (NFH), β-globin minigene nβ2, preproenkephalin (PPE), enkephalin (Enk) and excitatory amino acid transporter 2 (EAAT2) promoters. Non-limiting examples of tissue-specific expression elements for astrocytes include glial fibrillary acidic protein (GFAP) and EAAT2 promoters. A non-limiting example of a tissue-specific expression element for oligodendrocytes includes the myelin basic protein (MBP) promoter. Prion promoter represents an additional tissue specific promoter useful for driving protein expression in CNS tissue (see Loftus, Stacie K., et al. Human molecular genetics 11.24 (2002): 3107-3114, the disclosure of which is incorporated by reference in its entirety).

[0515] In some embodiments, the promoter may be less than 1 kb. The promoter may have a length of 200, 210, 220, 230, 240, 250, 260, 270, 280, 290, 300, 310, 320, 330, 340, 350, 360, 370, 380, 390, 400, 410, 420, 430, 440, 450, 460, 470, 480, 490, 500, 510, 520, 530, 540, 550, 560, 570, 580, 590, 600, 610, 620, 630, 640, 650, 660, 670, 680, 690, 700, 710, 720, 730, 740, 750, 760, 770, 780, 790, 800, or more than 800 nucleotides. The promoter may have a length between 200-300, 200-400, 200-500, 200-600, 200-700, 200-800, 300-400, 300-500, 300-600, 300-700, 300-800, 400-500, 400-600, 400-700, 400-800, 500-600, 500-700, 500-800, 600-700, 600-800, or 700-800 nucleotides.

[0516] In some embodiments, the promoter may be a combination of two or more components of the same or different starting or parental promoters such as, but not limited to, CMV and CBA. Each component may have a length of 200, 210, 220, 230, 240, 250, 260, 270, 280, 290, 300, 310, 320, 330, 340, 350, 360, 370, 380, 381, 382, 383, 384, 385, 386, 387, 388, 389, 390, 400, 410, 420, 430, 440, 450, 460, 470, 480, 490, 500, 510, 520, 530, 540, 550, 560, 570, 580, 590, 600, 610, 620, 630, 640, 650, 660, 670, 680, 690, 700, 710, 720, 730, 740, 750, 760, 770, 780, 790, 800, or more than 800 nucleotides. Each component may have a length between 200-300, 200-400, 200-500, 200-600, 200-700, 200-800, 300-400, 300-500, 300-600, 300-700, 300-800, 400-500, 400-600, 400-700, 400-800, 500-600, 500-700, 500-800, 600-700, 600-800 or 700-800 nucleotides. In some embodiments, the promoter is a combination of a 382 nucleotide CMV-enhancer sequence and a 260 nucleotide CBA-promoter sequence.

[0517] In some embodiments, the viral genome comprises a ubiquitous promoter. Non-limiting examples of ubiquitous promoters include CMV, CBA (including derivatives CAG, CB6, CBh, etc.), EF-1a, PGK, UBC, GUSB (hGBp), and UCOE (promoter of HNRPA2B1-CBX3). In some embodiments, the viral genome comprises an EF-1α promoter or EF-1α promoter variant.

[0518] In some embodiments, the promoter is a ubiquitous promoter as described in Yu et al. (Molecular Pain 2011, 7:63), Soderblom et al. (E. Neuro 2015), Gill et al., (Gene Therapy 2001, Vol. 8, 1539-1546), and Husain et al. (Gene Therapy 2009), each of which are incorporated by reference in their entirety.

[0519] In some embodiments, the promoter is not cell specific.

[0520] In some embodiments, the promoter is a ubiquitin c (UBC) promoter. The UBC promoter may have a size of 300-350 nucleotides. As a non-limiting example, the UBC promoter is 332 nucleotides. In some embodiments, the promoter is a β-glucuronidase (GUSB) promoter. The GUSB promoter may have a size of 350-400 nucleotides. As a non-limiting example, the GUSB promoter is 378 nucleotides. In some embodiments, the promoter is a neurofilament light (NFL) promoter. The NFL promoter may have a size of 600-700 nucleotides. As a non-limiting example, the NFL promoter is 650 nucleotides. In some embodiments, the promoter is a neurofilament heavy (NFH) promoter. The NFH promoter may have a size of 900-950 nucleotides. As a non-limiting example, the NFH promoter is 920 nucleotides. In some embodiments, the promoter is a scn8a promoter. The scn8a promoter may have a size of 450-500 nucleotides. As a non-limiting example, the scn8a promoter is 470 nucleotides.

[0521] In some embodiments, the promoter is a phosphoglycerate kinase 1 (PGK) promoter.

[0522] In some embodiments, the promoter is a chicken β-actin (CBA) promoter, or a functional variant thereof.

[0523] In some embodiments, the promoter is a CB6 promoter, or a functional variant thereof.

[0524] In some embodiments, the promoter is a CB promoter, or a functional variant thereof. In some embodiments, the promoter is a minimal CB promoter, or a functional variant thereof.

[0525] In some embodiments, the promoter is a CBA promoter, or functional variant thereof. In some embodiments, the promoter is a minimal CBA promoter, or functional variant thereof.

[0526] In some embodiments, the promoter is a cytomegalovirus (CMV) promoter, or a functional variant thereof.

[0527] In some embodiments, the promoter is a CAG promoter, or a functional variant thereof.

[0528] In some embodiments, the promoter is an EF1α promoter or functional variant thereof.

[0529] In some embodiments, the promoter is a GFAP promoter (as described, for example, in Zhang, Min, et al. Journal of neuroscience research 86.13 (2008): 2848-2856, the disclosure of which is incorporated by reference in its entirety) to drive expression of a GCase polypeptide, or a GCase polypeptide and an enhancement element (e.g., GCase and SapA, or GCase and SapC protein expression) in astrocytes.

[0530] In some embodiments, the promoter is a synapsin promoter, or a functional variant thereof.

[0531] In some embodiments, the promoter is an RNA pol III promoter. As a non-limiting example, the RNA pol III promoter is U6. As a non-limiting example, the RNA pol III promoter is H1.

[0532] In some embodiments, the viral genome comprises two promoters. As a non-limiting example, the promoters are an EF1α promoter and a CMV promoter.

[0533] In some embodiments, the viral genome comprises an enhancer element, a promoter and/or a 5′UTR intron. The enhancer element, also referred to herein as an “enhancer,” may be, but is not limited to, a CMV enhancer, the promoter may be, but is not limited to, a CMV, CBA, UBC, GUSB, NSE, Synapsin, MeCP2, and GFAP promoter and the 5′UTR/intron may be, but is not limited to, SV40, and CBA-MVM. As a non-limiting example, the enhancer, promoter and/or intron used in combination may be: (1) CMV enhancer, CMV promoter, SV40 5′UTR intron; (2) CMV enhancer, CBA promoter, SV 40 5′UTR intron; (3) CMV enhancer, CBA promoter, CBA-MVM 5′UTR intron; (4) UBC promoter; (5) GUSB promoter; (6) NSE promoter; (7) Synapsin promoter; (8) MeCP2 promoter; and (9) GFAP promoter.

[0534] In some embodiments, the viral genome comprises an enhancer. In some embodiments, the enhancer comprises a CMVie enhancer.

[0535] In some embodiments the viral genome comprises a CMVie enhancer and a CB promoter. In some embodiments, the viral genome comprises a CMVie enhancer and a CMV promoter (e.g., a CMV promoter region). In some embodiments, the viral genome comprises a CMVie enhancer, a CBA promoter or functional variant thereof, and an intron (e.g., a CAG promoter).

[0536] In some embodiments, the viral genome comprises an engineered promoter. In another embodiments, the viral genome comprises a promoter from a naturally expressed protein.

[0537] In some embodiments, a CBA promoter is used in a viral genomes of an AAV particle described herein, e.g., a viral genome encoding a GCase protein, or a GCase protein and an enhancement element (e.g., a GCase and SapA proteins, GCase and SapC proteins, or GCase protein and a cell penetrating peptide or variants thereof). In some embodiments, the CBA promoter is engineered for optimal expression of a GCase polypeptide or a GCase polypeptide and an enhancement element described herein (e.g., a prosaposin or saposin protein or variant thereof; a cell penetrating peptide or variant thereof; or a lysosomal targeting signal).

### Viral Genome Component: Introns

[0538] In some embodiments, the vector genome comprises at least one intron or a fragment or derivative thereof. In some embodiments, the at least one intron may enhance expression of a GCase protein and/or an enhancement element described herein (e.g., a prosaposin protein or a SapC protein or variant thereof; a cell penetrating peptide (e.g., a ApoEII peptide, a TAT peptide, or a ApoB peptide) or variant thereof; and/or a lysosomal targeting signal) (see e.g., Powell et al. Viral Expression Cassette Elements to Enhance Transgene Target Specificity and Expression in Gene Therapy, 2015; the contents of which are herein incorporated by reference in their entirety). Non-limiting examples of introns include, MVM (67-97 bps), F.IX truncated intron 1 (300 bps), β-globin SD/immunoglobulin heavy chain splice acceptor (250 bps), adenovirus splice donor/immunoglobin splice acceptor (500 bps), SV40 late splice donor/splice acceptor (19S/16S) (180 bps), and hybrid adenovirus splice donor/IgG splice acceptor (230 bps).

[0539] In some embodiments, the intron may be 100-500 nucleotides in length. The intron may have a length of 80, 90, 100, 110, 120, 130, 140, 150, 160, 170, 171, 172, 173, 174, 175, 176, 177, 178, 179, 180, 190, 200, 210, 220, 230, 240, 250, 260, 270, 280, 290, 300, 310, 320, 330, 340, 350, 360, 370, 380, 390, 400, 410, 420, 430, 440, 450, 460, 470, 480, 490 or 500 nucleotides. The intron may have a length between 80-100, 80-120, 80-140, 80-160, 80-180, 80-200, 80-250, 80-300, 80-350, 80-400, 80-450, 80-500, 200-300, 200-400, 200-500, 300-400, 300-500, or 400-500 nucleotides.

[0540] In some embodiments, the AAV vector may comprise an SV40 intron or fragment or variant thereof. In some embodiments, the promoter may be a CMV promoter. In some embodiments, the promoter may be CBA. In some embodiments, the promoter may be H1.

[0541] In some embodiments, the AAV vector may comprise a beta-globin intron or a fragment or variant thereof. In some embodiments, the intron comprises one or more human beta-globin sequences (e.g., including fragments/variants thereof). In some embodiments the promoter may be a CB promoter. In some embodiments, the promoter comprises a CMV promoter. In some embodiments, the promoter comprises a minimal CBA promoter.

[0542] In some embodiments, the encoded protein(s) may be located downstream of an intron in an expression vector such as, but not limited to, SV40 intron or beta globin intron or others known in the art. Further, the encoded GBA protein may also be located upstream of the polyadenylation sequence in an expression vector. In some embodiments, the encoded proteins may be located within 1, 2, 3, 4, 5, 6, 7, 8, 9, 10, 11, 12, 13, 14, 15, 16, 17, 18, 19, 20, 21, 22, 23, 24, 25, 26, 27, 28, 29, 30, or more than 30 nucleotides downstream from the promoter comprising an intron (e.g., 3′ relative to the promoter comprising an intron) and/or upstream of the polyadenylation sequence (e.g., 5′ relative to the polyadenylation sequence) in an expression vector. In some embodiments, the encoded GBA protein may be located within 1-5, 1-10, 1-15, 1-20, 1-25, 1-30, 5-10, 5-15, 5-20, 5-25, 5-30, 10-15, 10-20, 10-25, 10-30, 15-20, 15-25, 15-30, 20-25, 20-30, or 25-30 nucleotides downstream from the intron (e.g., 3′ relative to the intron) and/or upstream of the polyadenylation sequence (e.g., 5′ relative to the polyadenylation sequence) in an expression vector. In some embodiments, the encoded proteins may be located within the first 1%, 2%, 3%, 4%, 5%, 6%, 7%, 8%, 9%, 10%, 15%, 20%, 25%, or more than 25% of the nucleotides downstream from the intron (e.g., 3′ relative to the intron) and/or upstream of the polyadenylation sequence (e.g., 5′ relative to the polyadenylation sequence) in an expression vector. In some embodiments, the encoded proteins may be located within the first 1-5%, 1-10%, 1-15%, 1-20%, 1-25%, 5-10%, 5-15%, 5-20%, 5-25%, 10-15%, 10-20%, 10-25%, 15-20%, 15-25%, or 20-25% of the sequence downstream from the intron (e.g., 3′ relative to the intron) and/or upstream of the polyadenylation sequence (e.g., 5′ relative to the polyadenylation sequence) in an expression vector.

[0543] In certain embodiments, the intron sequence is not an enhancer sequence. In some embodiments, the intron sequence is not a sub-component of a promoter sequence. In some embodiments, the intron sequence is a sub-component of a promoter sequence.

### Viral Genome Component: Untranslated Regions (UTRs)

[0544] In some embodiments, a wild type untranslated region (UTR) of a gene is transcribed but not translated. Generally, the 5′ UTR starts at the transcription start site and ends at the start codon and the 3′ UTR starts immediately following the stop codon and continues until the termination signal for transcription.

[0545] Features typically found in abundantly expressed genes of specific target organs may be engineered into UTRs to enhance the stability and protein production. As a non-limiting example, a 5′ UTR from mRNA normally expressed in the liver (e.g., albumin, serum amyloid A, Apolipoprotein A/B/E, transferrin, alpha fetoprotein, erythropoietin, or Factor VIII) may be used in the viral genomes of the AAV particles of the disclosure to enhance expression in hepatic cell lines or liver.

[0546] In some embodiments, the viral genome encoding a transgene described herein (e.g., a transgene encoding a GBA protein) comprises a Kozak sequence. While not wishing to be bound by theory, wild-type 5′ untranslated regions (UTRs) include features that play roles in translation initiation. Kozak sequences, which are commonly known to be involved in the process by which the ribosome initiates translation of many genes, are usually included in 5′ UTRs. Kozak sequences have the consensus CCR(A/G)CCAUGG, where R is a purine (adenine or guanine) three bases upstream of the start codon (ATG), which is followed by another ‘G’.

[0547] In some embodiments, the 5′UTR in the viral genome includes a Kozak sequence.

[0548] In some embodiments, the 5′UTR in the viral genome does not include a Kozak sequence.

[0549] While not wishing to be bound by theory, wild-type 3′ UTRs are known to have stretches of adenosines and uridines embedded therein. These AU rich signatures are particularly prevalent in genes with high rates of turnover. Based on their sequence features and functional properties, the AU rich elements (AREs) can be separated into three classes (Chen et al, 1995, the contents of which are herein incorporated by reference in their entirety): Class I AREs, such as, but not limited to, c-Myc and MyoD, contain several dispersed copies of an AUUUA motif within U-rich regions. Class II AREs, such as, but not limited to, GM-CSF and TNF-α, possess two or more overlapping UUAUUUA(U/A)(U/A) nonamers. Class III ARES, such as, but not limited to, c-Jun and Myogenin, are less well defined. These U rich regions do not contain an AUUUA motif. Most proteins binding to the AREs are known to destabilize the messenger, whereas members of the ELAV family, most notably HuR, have been documented to increase the stability of mRNA. HuR binds to AREs of all the three classes. Engineering the HuR specific binding sites into the 3′ UTR of nucleic acid molecules will lead to HuR binding and thus, stabilization of the message in vivo.

[0550] Introduction, removal or modification of 3′ UTR AU rich elements (AREs) can be used to modulate the stability of polynucleotides. When engineering specific polynucleotides, e.g., payload regions of viral genomes, one or more copies of an ARE can be introduced to make polynucleotides less stable and thereby curtail translation and decrease production of the resultant protein. Likewise, AREs can be identified and removed or mutated to increase the intracellular stability and thus increase translation and production of the resultant protein.

[0551] In some embodiments, the 3′ UTR of the viral genome may include an oligo(dT) sequence for templated addition of a poly-A tail.

[0552] Any UTR from any gene known in the art may be incorporated into the viral genome of the AAV particle. These UTRs, or portions thereof, may be placed in the same orientation as in the gene from which they were selected or they may be altered in orientation or location. In some embodiments, the UTR used in the viral genome of the AAV particle may be inverted, shortened, lengthened, or made with one or more other 5′ UTRs or 3′ UTRs known in the art. As used herein, the term “altered,” as it relates to a UTR, means that the UTR has been changed in some way in relation to a reference sequence. For example, a 3′ or 5′ UTR may be altered relative to a wild type or native UTR by the change in orientation or location as taught above or may be altered by the inclusion of additional nucleotides, deletion of nucleotides, swapping or transposition of nucleotides.

[0553] In some embodiments, the viral genome of the AAV particle comprises at least one artificial UTR, which is not a variant of a wild type UTR.

[0554] In some embodiments, the viral genome of the AAV particle comprises UTRs which have been selected from a family of transcripts whose proteins share a common function, structure, feature, or property.

### Viral Genome Component: miR Binding Site

[0555] Tissue- or cell-specific expression of the AAV viral particles of the invention can be enhanced by introducing tissue- or cell-specific regulatory sequences, e.g., promoters, enhancers, microRNA binding sites, e.g., a detargeting site. Without wishing to be bound by theory, it is believed that an encoded miR binding site can modulate, e.g., prevent, suppress, or otherwise inhibit, the expression of a gene of interest on the viral genome of the invention, based on the expression of the corresponding endogenous microRNA (miRNA) or a corresponding controlled exogenous miRNA in a tissue or cell, e.g., a non-targeting cell or tissue. In some embodiments, a miR binding site modulates, e.g., reduces, expression of the payload encoded by a viral genome of an AAV particle described herein in a cell or tissue where the corresponding mRNA is expressed. In some embodiments, the miR binding site modulates, e.g., reduces, expression of the encoded GBA protein in a cell or tissue of the DRG, liver, hematopoietic lineage, or a combination thereof.

[0556] In some embodiments, the viral genome of an AAV particle described herein comprises a nucleotide sequence encoding a microRNA binding site, e.g., a detargeting site. In some embodiments, the viral genome of an AAV particle described herein comprises a nucleotide sequence encoding a miR binding site, a microRNA binding site series (miR BSs), or a reverse complement thereof.

[0557] In some embodiments, the nucleotide sequence encoding the miR binding site series or the miR binding site is located in the 3′-UTR region of the viral genome (e.g., 3′ relative to the nucleic acid sequence encoding a payload), e.g., before the polyA sequence, 5′-UTR region of the viral genome (e.g., 5′ relative to the nucleic acid sequence encoding a payload), or both.

[0558] In some embodiments, the encoded miR binding site series comprise at least 1-5 copies, e.g., at least 1-3, 2-4, 3-5, 1, 2, 3, 4, 5 or more copies of a miR binding site (miR BS). In some embodiments, the encoded miR binding site series comprises 4 copies of a miR binding site. In some embodiments, all copies are identical, e.g., comprise the same miR binding site. In some embodiments, the miR binding sites within the encoded miR binding site series are continuous and not separated by a spacer. In some embodiments, the miR binding sites within an encoded miR binding site series are separated by a spacer, e.g., a non-coding sequence. In some embodiments, the spacer is about 1 to 6 nucleotides or about 5 to 10 nucleotides, e.g., about 7-8 nucleotides, nucleotides in length. In some embodiments, the spacer is about 8 nucleotides in length. In some embodiments, the spacer sequence comprises one or more of (i) GGAT; (ii) CACGTG; (iii) GCATGC, or a repeat of one or more of (i)-(iii). In some embodiments, the spacer comprises the nucleotide sequence of SEQ ID NO: 1848, or a nucleotide sequence having at least one, two, or three modifications, but no more than four modifications of SEQ ID NO: 1848.

[0559] In some embodiments, the encoded miR binding site series comprise at least 1-5 copies, e.g., at least 1-3, 2-4, 3-5, 1, 2, 3, 4, 5 or more copies of a miR binding site (miR BS). In some embodiments, at least 1, 2, 3, 4, 5, or all of the copies are different, e.g., comprise a different miR binding site. In some embodiments, the miR binding sites within the encoded miR binding site series are continuous and not separated by a spacer. In some embodiments, the miR binding sites within an encoded miR binding site series are separated by a spacer, e.g., a non-coding sequence. In some embodiments, the spacer is about 1 to 6 nucleotides or about 5 to 10 nucleotides, e.g., about 7-8 nucleotides or about 8 nucleotides, in length. In some embodiments, the spacer sequence comprises one or more of (i) GGAT; (ii) CACGTG; (iii) GCATGC, or a repeat of one or more of (i)-(iii). In some embodiments, the spacer comprises the nucleotide sequence of SEQ ID NO: 1848, or a nucleotide sequence having at least one, two, or three modifications, but no more than four modifications of SEQ ID NO: 1848.

[0560] In some embodiments, the encoded miR binding site is substantially identical (e.g., at least 70%, 75%, 80%, 85%, 90%, 95%, 99% or 100% identical), to the miR in the host cell. In some embodiments, the encoded miR binding site comprises at least 1, 2, 3, 4, or 5 mismatches or no more than 6, 7, 8, 9, or 10 mismatches to a miR in the host cell. In some embodiments, the mismatched nucleotides are contiguous. In some embodiments, the mismatched nucleotides are non-contiguous. In some embodiments, the mismatched nucleotides occur outside the seed region-binding sequence of the miR binding site, such as at one or both ends of the miR binding site. In some embodiments, the encoded miR binding site is 100% identical to the miR in the host cell.

[0561] In some embodiments, the nucleotide sequence encoding the miR binding site is substantially complimentary (e.g., at least 70%, 75%, 80%, 85%, 90%, 95%, 99% or 100% complementary), to the miR in the host cell. In some embodiments, the sequence complementary to the nucleotide sequence encoding the miR binding site comprises at least 1, 2, 3, 4, or 5 mismatches or no more than 6, 7, 8, 9, or 10 mismatches relative to the corresponding miR in the host cell. In some embodiments, the mismatched nucleotides are contiguous. In some embodiments, the mismatched nucleotides are non-contiguous. In some embodiments, the mismatched nucleotides occur outside the seed region-binding sequence of the miR binding site, such as at one or both ends of the miR binding site. In some embodiments, the encoded miR binding site is 100% complementary to the miR in the host cell.

[0562] In some embodiments, the encoded miR binding site or the encoded miR binding site series is about 10 to about 125 nucleotides in length, e.g., about 10 to 50 nucleotides, 10 to 100 nucleotides, 50 to 100 nucleotides, 50 to 125 nucleotides, or 100 to 125 nucleotides in length. In some embodiments, an encoded miR binding site or the encoded miR binding site series is about 7 to about 28 nucleotides in length, e.g., about 8-28 nucleotides, 7-28 nucleotides, 8-18 nucleotides, 12-28 nucleotides, 20-26 nucleotides, 22 nucleotides, 24 nucleotides, or 26 nucleotides in length, and optionally comprises at least one consecutive region (e.g., 7 or 8 nucleotides) complementary (e.g., full complementary or partially complementary) to the seed sequence of a miRNA (e.g., a miR122, a miR142, a miR183).

[0563] In some embodiments, the encoded miR binding site is complementary (e.g., fully complementary or partially complementary) to a miR expressed in liver or hepatocytes, such as miR122. In some embodiments, the encoded miR binding site or encoded miR binding site series comprises a miR122 binding site sequence. In some embodiments, the encoded miR122 binding site comprises the nucleotide sequence of ACAAACACCATTGTCACACTCCA (SEQ ID NO: 1865), or a nucleotide sequence having at least 50%, 55%, 60%, 65%, 70%, 75%, 80%, 85%, 90%, at least 95%, at least 99%, or 100% sequence identity, or having at least one, two, three, four, five, six, or seven modifications but no more than ten modifications to SEQ ID NO: 1865, e.g., wherein the modification can result in a mismatch between the encoded miR binding site and the corresponding miRNA. In some embodiments, the viral genome comprises at least 3, 4, or 5 copies of the encoded miR122 binding site, e.g., an encoded miR122 binding site series, optionally wherein the encoded miR122 binding site series comprises the nucleotide sequence of: ACAAACACCATTGTCACACTCCACACAAACACCATTGTCACACTCCACACAAACACCATTGTCA CACTCCA (SEQ ID NO: 1866), or a nucleotide sequence having at least 50%, 55%, 60%, 65%, 70%, 75%, 80%, 85%, 90%, at least 95%, at least 99%, or 100% sequence identity, or having at least one, two, three, four, five, six, or seven modifications but no more than ten modifications to SEQ ID NO: 1866, e.g., wherein the modification can result in a mismatch between the encoded miR binding site and the corresponding miRNA. In some embodiments, at least two of the encoded miR122 binding sites are connected directly, e.g., without a spacer. In other embodiments, at least two of the encoded miR122 binding sites are separated by a spacer, e.g., 1, 2, 3, 4, 5, 6, 7, 8, 9, or 10 nucleotides in length, which is located between two or more consecutive encoded miR122 binding site sequences. In embodiments, the spacer is about 1 to 6 nucleotides or about 5 to 10 nucleotides, e.g., about 7-8 nucleotides or about 8 nucleotides, in length. In some embodiments, the spacer sequence comprises one or more of (i) GGAT; (ii) CACGTG; (iii) GCATGC, or a repeat of one or more of (i)-(iii). In some embodiments, the spacer comprises the nucleotide sequence of SEQ ID NO: 1848, or a nucleotide sequence having at least one, two, or three modifications, but no more than four modifications of SEQ ID NO: 1848.

[0564] In some embodiments, the encoded miR binding site is complementary (e.g., fully complementary or partially complementary) to a miR expressed in hematopoietic lineage, including immune cells (e.g., antigen presenting cells or APC, including dendritic cells (DCs), macrophages, and B-lymphocytes). In some embodiments, the encoded miR binding site is complementary (e.g., fully complementary or partially complementary) to a miR expressed in hematopoietic lineage comprises a nucleotide sequence disclosed, e.g., in US 2018/0066279, the contents of which are incorporated by reference herein in its entirety.

[0565] In some embodiments, the encoded miR binding site or encoded miR binding site series comprises a miR-142-3p binding site sequence. In some embodiments, the encoded miR-142-3p binding site comprises the nucleotide sequence of TCCATAAAGTAGGAAACACTACA (SEQ ID NO: 1869), a nucleotide sequence having at least 50%, 55%, 60%, 65%, 70%, 75%, 80%, 85%, 90%, at least 95%, at least 99%, or 100% sequence identity, or having at least one, two, three, four, five, six, or seven modifications but no more than ten modifications to SEQ ID NO: 1842, e.g., wherein the modification can result in a mismatch between the encoded miR binding site and the corresponding miRNA. In some embodiments, the viral genome comprises at least 3, 4, or 5 copies of an encoded miR-142-3p binding site, e.g., an encoded miR-142-3p binding site series. In some embodiments, the at least 3, 4, or 5 copies (e.g., 4 copies) of the encoded miR-142-3p binding site are continuous (e.g., not separated by a spacer) or separated by a spacer. In some embodiments, the spacer is about 1 to 6 nucleotides or about 5 to 10 nucleotides, e.g., about 7-8 nucleotides or about 8 nucleotides, in length. In some embodiments, the spacer sequence comprises one or more of (i) GGAT; (ii) CACGTG; (iii) GCATGC, or a repeat of one or more of (i)-(iii). In some embodiments, the spacer comprises the nucleotide sequence of SEQ ID NO: 1848, or a nucleotide sequence having at least one, two, or three modifications, but no more than four modifications of SEQ ID NO: 1848.

[0566] In some embodiments, the encoded miR binding site is complementary (e.g., fully complementary or partially complementary) to a miR expressed in a DRG (dorsal root ganglion) neuron, e.g., a miR183, a miR182, and/or miR96 binding site. In some embodiments, the encoded miR binding site is complementary (e.g., fully complementary or partially complementary) to a miR expressed in expressed in a DRG neuron. In some embodiments, the encoded miR binding site comprises a nucleotide sequence disclosed, e.g., in WO2020/132455, the contents of which are incorporated by reference herein in its entirety.

[0567] In some embodiments, the encoded miR binding site or encoded miR binding site series comprises a miR183 binding site sequence. In some embodiments, the encoded miR183 binding site comprises the nucleotide sequence of AGTGAATTCTACCAGTGCCATA (SEQ ID NO: 1847), or a nucleotide sequence having at least 50%, 55%, 60%, 65%, 70%, 75%, 80%, 85%, 90%, at least 95%, at least 99%, or 100% sequence identity, or having at least one, two, three, four, five, six, or seven modifications but no more than ten modifications to SEQ ID NO: 1847, e.g., wherein the modification can result in a mismatch between the encoded miR binding site and the corresponding miRNA. In some embodiments, the sequence complementary (e.g., fully complementary or partially complementary) to the seed sequence corresponds to the double underlined of the encoded miR-183 binding site sequence. In some embodiments, the viral genome comprises at least comprises at least 3, 4, or 5 copies (e.g., 4 copies) of the encoded miR183 binding site, e.g. an encoded miR183 binding site. In some embodiments, the viral genome comprises at least comprises 4 copies of the encoded miR183 binding site, e.g. an encoded miR183 binding site comprising 4 copies of a miR183 binding site. In some embodiments, the at least 3, 4, or 5 copies (e.g., 4 copies) of the encoded miR183 binding site are continuous (e.g., not separated by a spacer) or separated by a spacer. In some embodiments, the spacer is about 1 to 6 nucleotides or about 5 to 10 nucleotides, e.g., about 7-8 nucleotides or about 8 nucleotides, in length. In some embodiments, the spacer comprises the nucleotide sequence of SEQ ID NO: 1848, or a nucleotide sequence having at least one, two, or three modifications, but no more than four modifications of SEQ ID NO: 1848. In some embodiments, the encoded miR183 binding site series comprises the nucleotide sequence of SEQ ID NO: 1849, or a nucleotide sequence having at least 50%, 55%, 60%, 65%, 70%, 75%, 80%, 85%, 90%, at least 95%, at least 99%, or 100% sequence identity, or having at least one, two, three, four, five, six, or seven modifications but no more than ten modifications to SEQ ID NO: 1849.

[0568] In some embodiments, the encoded miR binding site or encoded miR binding site series comprises a miR182 binding site sequence. In some embodiments, the encoded miR182 binding site comprises, the nucleotide sequence of AGTGTGAGTTCTACCATTGCCAAA (SEQ ID NO: 1867), a nucleotide sequence having at least 50%, 55%, 60%, 65%, 70%, 75%, 80%, 85%, 90%, at least 95%, at least 99%, or 100% sequence identity, or having at least one, two, three, four, five, six, or seven modifications but no more than ten modifications to SEQ ID NO: 1867, e.g., wherein the modification can result in a mismatch between the encoded miR binding site and the corresponding miRNA. In some embodiments, the viral genome comprises at least 3, 4, or 5 copies of the encoded miR182 binding site, e.g., an encoded miR182 binding site series. In some embodiments, the at least 3, 4, or 5 copies (e.g., 4 copies) of the encoded miR182 binding site are continuous (e.g., not separated by a spacer) or separated by a spacer. In some embodiments, the spacer is about 1 to 6 nucleotides or about 5 to 10 nucleotides, e.g., about 7-8 nucleotides or about 8 nucleotides, in length. In some embodiments, the spacer comprises the nucleotide sequence of SEQ ID NO: 1848, or a nucleotide sequence having at least one, two, or three modifications, but no more than four modifications of SEQ ID NO: 1848.

[0569] In some embodiments, the encoded miR binding site or encoded miR binding site series comprises a miR96 binding site sequence. In some embodiments, the encoded miR96 binding site comprises the nucleotide sequence of AGCAAAAATGTGCTAGTGCCAAA (SEQ ID NO: 1868), a sequence having at least 50%, 55%, 60%, 65%, 70%, 75%, 80%, 85%, 90%, at least 95%, at least 99%, or 100% sequence identity, or having at least one, two, three, four, five, six, or seven modifications but no more than ten modifications to SEQ ID NO: 1868, e.g., wherein the modification can result in a mismatch between the encoded miR binding site and the corresponding miRNA. In some embodiments, the viral genome comprises at least 3, 4, or 5 copies of the encoded miR96 binding site, e.g., an encoded miR96 binding site series. In some embodiments, the at least 3, 4, or 5 copies (e.g., 4 copies) of the encoded miR96 binding site are continuous (e.g., not separated by a spacer) or separated by a spacer. In some embodiments, the spacer is about 1 to 6 nucleotides or about 5 to 10 nucleotides, e.g., about 7-8 nucleotides or about 8 nucleotides, in length. In some embodiments, the spacer comprises the nucleotide sequence of SEQ ID NO: 1848, or a nucleotide sequence having at least one, two, or three modifications, but no more than four modifications of SEQ ID NO: 1848.

[0570] In some embodiments, the encoded miR binding site series comprises a miR122 binding site, a miR142 binding site, a miR183 binding site, a miR182 binding site, a miR 96 binding site, or a combination thereof. In some embodiments, the encoded miR binding site series comprises at least 3, 4, or 5 copies of a miR122 binding site, a miR142 binding site, a miR183 binding site, a miR182 binding site, a miR 96 binding site, or a combination thereof. In some embodiments, at least two of the encoded miR binding sites are connected directly, e.g., without a spacer. In other embodiments, at least two of the encoded miR binding sites are separated by a spacer, e.g., 1, 2, 3, 4, 5, 6, 7, 8, 9, or 10 nucleotides in length, which is located between two or more consecutive encoded miR binding site sequences. In embodiments, the spacer is at least about 5 to 10 nucleotides, e.g., about 7-8 nucleotides or about 8 nucleotides, in length. In some embodiments, the spacer sequence comprises one or more of (i) GGAT; (ii) CACGTG; (iii) GCATGC, or a repeat of one or more of (i)-(iii). In some embodiments, the spacer comprises the nucleotide sequence of SEQ ID NO: 1848, or a nucleotide sequence having at least one, two, or three modifications, but no more than four modifications of SEQ ID NO: 1848.

[0571] In some embodiments, an encoded miR binding site series comprises at least 3-5 copies (e.g., 4 copies) of a combination of at least two, three, four, five, or all of a miR122 binding site, a miR142 binding site, a miR183 binding site, a miR182 binding site, a miR96 binding site, wherein each of the miR binding sites within the series are continuous (e.g., not separated by a spacer) or separated by a spacer. In some embodiments, the spacer is about 1 to 6 nucleotides or about 5 to 10 nucleotides, e.g., about 7-8 nucleotides or about 8 nucleotides, in length. In some embodiments, the spacer sequence comprises one or more of (i) GGAT; (ii) CACGTG; (iii) GCATGC, or a repeat of one or more of (i)-(iii). In some embodiments, the spacer comprises the nucleotide sequence of SEQ ID NO: 1848, or a nucleotide sequence having at least one, two, or three modifications, but no more than four modifications of SEQ ID NO:

### Viral Genome Component: Polyadenylation Sequence

[0572] In some embodiments, the viral genome of the AAV particles of the present disclosure comprises at least one polyadenylation (polyA) sequence. The viral genome of the AAV particle may comprise a polyadenylation sequence between the 3′ end of the payload coding sequence and the 5′ end of the 3′UTR. In some embodiments, the polyA signal region is positioned 3′ relative to the nucleic acid comprising the transgene encoding the payload, e.g., a GBA protein described herein.

[0573] In some embodiments, the polyA signal region comprises a length of about 100-600 nucleotides, e.g., about 100-500 nucleotides, about 100-400 nucleotides, about 100-300 nucleotides, about 100-200 nucleotides, about 200-600 nucleotides, about 200-500 nucleotides, about 200-400 nucleotides, about 200-300 nucleotides, about 300-600 nucleotides, about 300-500 nucleotides, about 300-400 nucleotides, about 400-600 nucleotides, about 400-500 nucleotides, or about 500-600 nucleotides. In some embodiments, the polyA signal region comprises a length of about 100 to 150 nucleotides, e.g., about 127 nucleotides. In some embodiments, the polyA signal region comprises a length of about 450 to 500 nucleotides, e.g., about 477 nucleotides. In some embodiments, the polyA signal region comprises a length of about 520 to about 560 nucleotides, e.g., about 552 nucleotides. In some embodiments, the polyA signal region comprises a length of about 127 nucleotides.

[0574] In some embodiments, the viral genome comprises a human growth hormone (hGH) polyA sequence. In some embodiments, the viral genome comprises an hGH polyA as described above and a payload region encoding the GCase protein, or the GCase and an enhancement element (e.g., a prosaposin, SapA, or SapC protein, or variant thereof; a cell penetrating peptide (e.g., an ApoEII peptide, a TAT peptide, or an ApoB peptide); or a lysosomal targeting peptide) e.g., encoding a sequence as provided in Tables 3 and 4 or fragment or variant thereof.

### Viral Genome Component: Filler Sequence

[0575] In some embodiments, the viral genome comprises one or more filler sequences. The filler sequence may be a wild-type sequence or an engineered sequence. A filler sequence may be a variant of a wild-type sequence. In some embodiments, a filler sequence is a derivative of human albumin.

[0576] In some embodiments, the viral genome comprises one or more filler sequences in order to have the length of the viral genome be the optimal size for packaging. In some embodiments, the viral genome comprises at least one filler sequence in order to have the length of the viral genome be about 2.3 kb. In some embodiments, the viral genome comprises at least one filler sequence in order to have the length of the viral genome be about 4.6 kb.

[0577] In some embodiments, the viral genome is a single stranded (ss) viral genome and comprises one or more filler sequences that, independently or together, have a length about between 0.1 kb-3.8 kb, such as, but not limited to, 0.1 kb, 0.2 kb, 0.3 kb, 0.4 kb, 0.5 kb, 0.6 kb, 0.7 kb, 0.8 kb, 0.9 kb, 1 kb, 1.1 kb, 1.2 kb, 1.3 kb, 1.4 kb, 1.5 kb, 1.6 kb, 1.7 kb, 1.8 kb, 1.9 kb, 2 kb, 2.1 kb, 2.2 kb, 2.3 kb, 2.4 kb, 2.5 kb, 2.6 kb, 2.7 kb, 2.8 kb, 2.9 kb, 3 kb, 3.1 kb, 3.2 kb, 3.3 kb, 3.4 kb, 3.5 kb, 3.6 kb, 3.7 kb, or 3.8 kb. In some embodiments, the total length filler sequence in the vector genome is 3.1 kb. In some embodiments, the total length filler sequence in the vector genome is 2.7 kb. In some embodiments, the total length filler sequence in the vector genome is 0.8 kb. In some embodiments, the total length filler sequence in the vector genome is 0.4 kb. In some embodiments, the length of each filler sequence in the vector genome is 0.8 kb. In some embodiments, the length of each filler sequence in the vector genome is 0.4 kb.

[0578] In some embodiments, the viral genome is a self-complementary (sc) viral genome and comprises one or more filler sequences that, independently or together, have a length about between 0.1 kb-1.5 kb, such as, but not limited to, 0.1 kb, 0.2 kb, 0.3 kb, 0.4 kb, 0.5 kb, 0.6 kb, 0.7 kb, 0.8 kb, 0.9 kb, 1 kb, 1.1 kb, 1.2 kb, 1.3 kb, 1.4 kb, or 1.5 kb. In some embodiments, the total length filler sequence in the vector genome is 0.8 kb. In some embodiments, the total length filler sequence in the vector genome is 0.4 kb. In some embodiments, the length of each filler sequence in the vector genome is 0.8 kb. In some embodiments, the length of each filler sequence in the vector genome is 0.4 kb.

[0579] In some embodiments, the viral genome comprises any portion of a filler sequence. The viral genome may comprise 1%, 2%, 3%, 4%, 5%, 6%, 7%, 8%, 9%, 10%, 15%, 20%, 25%, 30%, 35%, 40%, 45%, 50%, 55%, 60%, 65%, 70%, 75%, 80%, 85%, 90%, 95%, or 99% of a filler sequence.

[0580] In some embodiments, the viral genome is a single stranded (ss) viral genome and comprises one or more filler sequences in order to have the length of the viral genome be about 4.6 kb. In some embodiments, the viral genome comprises at least one filler sequence and the filler sequence is located 3′ to the 5′ ITR sequence. In some embodiments, the viral genome comprises at least one filler sequence and the filler sequence is located 5′ to a promoter sequence. In some embodiments, the viral genome comprises at least one filler sequence and the filler sequence is located 3′ to the polyadenylation signal sequence. In some embodiments, the viral genome comprises at least one filler sequence and the filler sequence is located 5′ to the 3′ ITR sequence. In some embodiments, the viral genome comprises at least one filler sequence, and the filler sequence is located between two intron sequences. In some embodiments, the viral genome comprises at least one filler sequence, and the filler sequence is located within an intron sequence. In some embodiments, the viral genome comprises two filler sequences, and the first filler sequence is located 3′ to the 5′ ITR sequence and the second filler sequence is located 3′ to the polyadenylation signal sequence. In some embodiments, the viral genome comprises two filler sequences, and the first filler sequence is located 5′ to a promoter sequence and the second filler sequence is located 3′ to the polyadenylation signal sequence. In some embodiments, the viral genome comprises two filler sequences, and the first filler sequence is located 3′ to the 5′ ITR sequence and the second filler sequence is located 5′ to the 5′ ITR sequence.

[0581] In some embodiments, the viral genome is a self-complementary (sc) viral genome and comprises one or more filler sequences in order to have the length of the viral genome be about 2.3 kb. In some embodiments, the viral genome comprises at least one filler sequence and the filler sequence is located 3′ to the 5′ ITR sequence. In some embodiments, the viral genome comprises at least one filler sequence and the filler sequence is located 5′ to a promoter sequence. In some embodiments, the viral genome comprises at least one filler sequence and the filler sequence is located 3′ to the polyadenylation signal sequence. In some embodiments, the viral genome comprises at least one filler sequence and the filler sequence is located 5′ to the 3′ ITR sequence. In some embodiments, the viral genome comprises at least one filler sequence, and the filler sequence is located between two intron sequences. As a non-limiting example, the viral genome comprises at least one filler sequence, and the filler sequence is located within an intron sequence. In some embodiments, the viral genome comprises two filler sequences, and the first filler sequence is located 3′ to the 5′ ITR sequence and the second filler sequence is located 3′ to the polyadenylation signal sequence. In some embodiments, the viral genome comprises two filler sequences, and the first filler sequence is located 5′ to a promoter sequence and the second filler sequence is located 3′ to the polyadenylation signal sequence. In some embodiments, the viral genome comprises two filler sequences, and the first filler sequence is located 3′ to the 5′ ITR sequence and the second filler sequence is located 5′ to the 5′ ITR sequence.

[0582] In some embodiments, the viral genome may comprise one or more filler sequences between one of more regions of the viral genome. In some embodiments, the filler region may be located before a region such as, but not limited to, a payload region, an inverted terminal repeat (ITR), a promoter region, an intron region, an enhancer region, a polyadenylation signal sequence region, and/or an exon region. In some embodiments, the filler region may be located after a region such as, but not limited to, a payload region, an inverted terminal repeat (ITR), a promoter region, an intron region, an enhancer region, a polyadenylation signal sequence region, and/or an exon region. In some embodiments, the filler region may be located before and after a region such as, but not limited to, a payload region, an inverted terminal repeat (ITR), a promoter region, an intron region, an enhancer region, a polyadenylation signal sequence region, and/or an exon region.

[0583] In some embodiments, the viral genome may comprise one or more filler sequences that bifurcate(s) at least one region of the viral genome. The bifurcated region of the viral genome may comprise 1%, 2%, 3%, 4%, 5%, 6%, 7%, 8%, 9%, 10%, 15%, 20%, 25%, 30%, 35%, 40%, 45%, 50%, 55%, 60%, 65%, 70%, 75%, 80%, 85%, 90%, 95%, or 99% of the of the region to the 5′ of the filler sequence region. In some embodiments, the filler sequence may bifurcate at least one region so that 10% of the region is located 5′ to the filler sequence and 90% of the region is located 3′ to the filler sequence. In some embodiments, the filler sequence may bifurcate at least one region so that 20% of the region is located 5′ to the filler sequence and 80% of the region is located 3′ to the filler sequence. In some embodiments, the filler sequence may bifurcate at least one region so that 30% of the region is located 5′ to the filler sequence and 70% of the region is located 3′ to the filler sequence. In some embodiments, the filler sequence may bifurcate at least one region so that 40% of the region is located 5′ to the filler sequence and 60% of the region is located 3′ to the filler sequence. In some embodiments, the filler sequence may bifurcate at least one region so that 50% of the region is located 5′ to the filler sequence and 50% of the region is located 3′ to the filler sequence. In some embodiments, the filler sequence may bifurcate at least one region so that 60% of the region is located 5′ to the filler sequence and 40% of the region is located 3′ to the filler sequence. In some embodiments, the filler sequence may bifurcate at least one region so that 70% of the region is located 5′ to the filler sequence and 30% of the region is located 3′ to the filler sequence. In some embodiments, the filler sequence may bifurcate at least one region so that 80% of the region is located 5′ to the filler sequence and 20% of the region is located 3′ to the filler sequence. In some embodiments, the filler sequence may bifurcate at least one region so that 90% of the region is located 5′ to the filler sequence and 10% of the region is located 3′ to the filler sequence.

[0584] In some embodiments, the viral genome comprises a filler sequence after the 5′ ITR.

[0585] In some embodiments, the viral genome comprises a filler sequence after the promoter region. In some embodiments, the viral genome comprises a filler sequence after the payload region. In some embodiments, the viral genome comprises a filler sequence after the intron region. In some embodiments, the viral genome comprises a filler sequence after the enhancer region. In some embodiments, the viral genome comprises a filler sequence after the polyadenylation signal sequence region. In some embodiments, the viral genome comprises a filler sequence after the exon region.

[0586] In some embodiments, the viral genome comprises a filler sequence before the promoter region. In some embodiments, the viral genome comprises a filler sequence before the payload region. In some embodiments, the viral genome comprises a filler sequence before the intron region. In some embodiments, the viral genome comprises a filler sequence before the enhancer region. In some embodiments, the viral genome comprises a filler sequence before the polyadenylation signal sequence region. In some embodiments, the viral genome comprises a filler sequence before the exon region.

[0587] In some embodiments, the viral genome comprises a filler sequence before the 3′ ITR.

[0588] In some embodiments, a filler sequence may be located between two regions, such as, but not limited to, the 5′ ITR and the promoter region. In some embodiments, a filler sequence may be located between two regions, such as, but not limited to, the 5′ ITR and the payload region. In some embodiments, a filler sequence may be located between two regions, such as, but not limited to, the 5′ ITR and the intron region. In some embodiments, a filler sequence may be located between two regions, such as, but not limited to, the 5′ ITR and the enhancer region. In some embodiments, a filler sequence may be located between two regions, such as, but not limited to, the 5′ ITR and the polyadenylation signal sequence region.

[0589] In some embodiments, a filler sequence may be located between two regions, such as, but not limited to, the 5′ ITR and the exon region.

[0590] In some embodiments, a filler sequence may be located between two regions, such as, but not limited to, the promoter region and the payload region. In some embodiments, a filler sequence may be located between two regions, such as, but not limited to, the promoter region and the intron region. In some embodiments, a filler sequence may be located between two regions, such as, but not limited to, the promoter region and the enhancer region. In some embodiments, a filler sequence may be located between two regions, such as, but not limited to, the promoter region and the polyadenylation signal sequence region. In some embodiments, a filler sequence may be located between two regions, such as, but not limited to, the promoter region and the exon region. In some embodiments, a filler sequence may be located between two regions, such as, but not limited to, the promoter region and the 3′ ITR.

[0591] In some embodiments, a filler sequence may be located between two regions, such as, but not limited to, the payload region and the intron region. In some embodiments, a filler sequence may be located between two regions, such as, but not limited to, the payload region and the enhancer region. In some embodiments, a filler sequence may be located between two regions, such as, but not limited to, the payload region and the polyadenylation signal sequence region. In some embodiments, a filler sequence may be located between two regions, such as, but not limited to, the payload region and the exon region.

[0592] In some embodiments, a filler sequence may be located between two regions, such as, but not limited to, the payload region and the 3′ ITR.

### Viral Genome Component: Payloads

[0593] In some embodiments, an AAV particle, e.g., an AAV particle for the vectorized delivery of a GBA protein, e.g., a GBA protein described herein, comprises a payload. In some embodiments, an AAV particle, e.g., an AAV particle for the vectorized delivery of a GBA protein described herein (e.g., an GBA protein), comprises a viral genome encoding a payload. In some embodiments, the viral genome comprises a promoter operably linked to a nucleic acid comprising a transgene encoding a payload. In some embodiments, the payload comprises an GBA protein.

[0594] In some embodiments, the disclosure herein provides constructs that allow for improved expression of GCase protein delivered by gene therapy vectors.

[0595] In some embodiments, the disclosure provides constructs that allow for improved biodistribution of GCase protein delivered by gene therapy vectors.

[0596] In some embodiments, the disclosure provides constructs that allow for improved sub-cellular distribution or trafficking of GCase protein delivered by gene therapy vectors.

[0597] In some embodiments, the disclosure provides constructs that allow for improved trafficking of GCase protein to lysosomal membranes delivered by gene therapy vectors.

[0598] In some aspects, the present disclosure relates to a composition containing or comprising a nucleic acid sequence encoding a GCase protein or functional fragment or variants thereof and methods of administering the composition in vitro or in vivo in a subject, e.g., a humans and/or an animal model of disease, e.g., a disease related to expression of GBA.

[0599] AAV particles of the present disclosure may comprise a nucleic acid sequence encoding at least one “payload.” As used herein, “payload” or “payload region” refers to one or more polynucleotides or polynucleotide regions encoded by or within a viral genome or an expression product of such polynucleotide or polynucleotide region, e.g., a transgene, a polynucleotide encoding a polypeptide or multi-polypeptide, e.g., GCase protein or fragment or variant thereof. The payload may comprise any nucleic acid known in the art that is useful for the expression (by supplementation of the protein product or gene replacement using a modulatory nucleic acid) of GCase protein in a target cell transduced or contacted with the AAV particle carrying the payload.

[0600] Specific features of a transgene encoding GCase for use in an AAV genome as described herein include the use of a wildtype GBA-encoding sequence and enhanced GBA-encoding constructs. In some instances, the GBA-encoding sequence is a recombinant and/or modified GBA sequence as described in Int'l Pub. No. WO2019040507, the contents of which are herein incorporated by reference in their entirety. In some embodiments, the GBA-encoding sequence is as provided by NCBI Reference Sequence NCBI Reference Sequence NP_000148.2 (SEQ ID NO: 14 of Int'l Pub. No. WO2019070893, incorporated by reference herein). In some embodiments, the GBA-encoding sequence is codon optimized for expression in mammalian cells including human cells, such as the sequence set forth in SEQ ID NO: 15 of WO2019070893. In some embodiments, the viral genome comprises a sequence encoding Prosaposin (PSAP), the precursor of Saposin proteins A, B, C, and D (SapA, SapB, SapC, and SapD, respectively). The sequence encoding Prosaposin can be the sequence as provided by NCBI Reference Sequence NP_002769.1 (SEQ ID NO: 16 of WO2019070893). In some embodiments, the PSAP-encoding sequence is codon optimized for expression in mammalian cells including human cells, such as the sequence set forth in SEQ ID NO: 17 of WO2019070893. In some embodiments, the GBA-encoding sequence is a recombinant and/or modified GBA sequence as described in Int'l Pub. No. WO2019070894.

[0601] An enhanced GBA-encoding sequence, as described and exemplified herein, can achieve enhanced catalytic activity of the GCase enzyme by incorporation of prosaposin or saposin C coding sequence in the viral genome. Alternatively, an enhanced GBA-encoding sequence can achieve enhanced cell penetration of secreted GCase product by incorporating, e.g., HIV-derived TAT peptide, Human Apolipoprotein B receptor binding domain, Human Apolipoprotein E II receptor binding domain, or other cell penetration-enhancing sequences. In some embodiments, the enhanced GBA-encoding sequence can achieve enhanced intracellular lysosomal targeting by incorporating one or more of, a) an Rnase A-derived sequence; b) an HSC70-derived sequence; c) a Hemoglobin-derived sequence; d) a combination of Rnase A-, HSC70-, and Hemoglobin-derived lysosomal targeting sequences; or e) other lysosomal targeting enhancer sequences. An enhanced GB A-encoding sequences as described herein can, in some embodiments, incorporate combinatorial enhancements of the enhanced catalytic activity, enhanced cell-penetration activity, and/or enhanced lysosomal targeting features. In some embodiments, the combination(s) of these enhanced features have additive effects on GCase activity or expression in cells infected with AAV particles bearing the AAV genomes described herein. For example, in some embodiments, the AAV genome described herein comprise a GCase-encoding nucleic acid sequence having a lysosomal targeting sequence, GCase-coding sequence, linker, and PSAP/SapC-encoding sequence. In some embodiments, the combination(s) of these enhanced features have synergistic effects on GCase activity or expression in cells infected with AAV particles bearing the AAV genomes described herein.

[0602] The payload construct may comprise a combination of coding and non-coding nucleic acid sequences.

[0603] Any segment, fragment, or the entirety of the viral genome and therein, the payload region, may be codon optimized.

[0604] In some embodiments, the viral genome encodes more than one payload. As a non-limiting example, a viral genome encoding more than one payload may be replicated and packaged into a viral particle. A target cell transduced with a viral particle comprising more than one payload may express each of the payloads in a single cell.

[0605] In some embodiments, the viral genome may encode a coding or non-coding RNA. In certain embodiments, the adeno-associated viral vector particle further comprises at least one cis-element selected from the group consisting of a Kozak sequence, a backbone sequence, and an intron sequence.

[0606] In some embodiments, the payload is a polypeptide which may be a peptide or protein. A protein encoded by the payload construct may comprise a secreted protein, an intracellular protein, an extracellular protein, and/or a membrane protein. The encoded proteins may be structural or functional. Proteins encoded by the viral genome include, but are not limited to, mammalian proteins. In certain embodiments, the AAV particle contains a viral genome that encodes GCase protein or a fragment or variant thereof. The AAV particles described herein may be useful in the fields of human disease, veterinary applications, and a variety of in vivo and in vitro settings.

[0607] In some embodiments, a payload may comprise polypeptides that serve as marker proteins to assess cell transformation and expression, fusion proteins, polypeptides having a desired biological activity, gene products that can complement a genetic defect, RNA molecules, transcription factors, and other gene products that are of interest in regulation and/or expression. In some embodiments, a payload may comprise nucleotide sequences that provide a desired effect or regulatory function (e.g., transposons, transcription factors).

[0608] The encoded payload may comprise a gene therapy product. A gene therapy product may include, but is not limited to, a polypeptide, RNA molecule, or other gene product that, when expressed in a target cell, provides a desired therapeutic effect. In some embodiments, a gene therapy product may comprise a substitute for a non-functional gene or a gene that is absent, expressed in insufficient amounts, or mutated. In some embodiments, a gene therapy product may comprise a substitute for a non-functional protein or polypeptide or a protein or polypeptide that is absent, expressed in insufficient amounts, misfolded, degraded too rapidly, or mutated. For example, a gene therapy product may comprise a GCase protein or a polynucleotide encoding GCase protein to treat GCase deficiency or GBA-related disorders.

[0609] In some embodiments, the payload encodes a messenger RNA (mRNA). As used herein, the term “messenger RNA” (mRNA) refers to any polynucleotide that encodes a polypeptide of interest and that is capable of being translated to produce the encoded polypeptide of interest in vitro, in vivo, in situ, or ex vivo. Certain embodiments provide the mRNA as encoding GCase or a variant thereof.

[0610] The components of an mRNA include, but are not limited to, a coding region, a 5′-UTR (untranslated region), a 3′-UTR, a 5′-cap and a poly-A tail. In some embodiments, the encoded mRNA or any portion of the AAV genome may be codon optimized.

[0611] In some embodiments, the protein or polypeptide encoded by the payload construct encoding GCase or a variant thereof is between about 50 and about 4500 amino acid residues in length (hereinafter in this context, “X amino acids in length” refers to X amino acid residues). In some embodiments, the protein or polypeptide encoded is between 50-2000 amino acids in length. In some embodiments, the protein or polypeptide encoded is between 50-1000 amino acids in length. In some embodiments, the protein or polypeptide encoded is between 50-1500 amino acids in length. In some embodiments, the protein or polypeptide encoded is between 50-1000 amino acids in length. In some embodiments, the protein or polypeptide encoded is between 50-800 amino acids in length. In some embodiments, the protein or polypeptide encoded is between 50-600 amino acids in length. In some embodiments, the protein or polypeptide encoded is between 50-400 amino acids in length. In some embodiments, the protein or polypeptide encoded is between 50-200 amino acids in length. In some embodiments, the protein or polypeptide encoded is between 50-100 amino acids in length.

[0612] A payload construct encoding a payload may comprise or encode a selectable marker. A selectable marker may comprise a gene sequence or a protein or polypeptide encoded by a gene sequence expressed in a host cell that allows for the identification, selection, and/or purification of the host cell from a population of cells that may or may not express the selectable marker. In some embodiments, the selectable marker provides resistance to survive a selection process that would otherwise kill the host cell, such as treatment with an antibiotic. In some embodiments, an antibiotic selectable marker may comprise one or more antibiotic resistance factors, including but not limited to neomycin resistance (e.g., neo), hygromycin resistance, kanamycin resistance, and/or puromycin resistance.

[0613] In some embodiments, a payload construct encoding a payload may comprise a selectable marker including, but not limited to, β-lactamase, luciferase, β-galactosidase, or any other reporter gene as that term is understood in the art, including cell-surface markers, such as CD4 or the truncated nerve growth factor (NGFR) (for GFP, see WO 96/23810; Heim et al., Current Biology 2:178-182 (1996); Heim et al., Proc. Natl. Acad. Sci. USA (1995); or Heim et al., Science 373:663-664 (1995); for β-lactamase, see WO 96/30540); the contents of each of which are herein incorporated by reference in their entirety.

[0614] In some embodiments, a payload construct encoding a selectable marker may comprise a fluorescent protein. A fluorescent protein as herein described may comprise any fluorescent marker including but not limited to green, yellow, and/or red fluorescent protein (GFP, YFP, and/or RFP). In some embodiments, a payload construct encoding a selectable marker may comprise a human influenza hemagglutinin (HA) tag.

[0615] In certain embodiments, a nucleic acid for expression of a payload in a target cell will be incorporated into the viral genome and located between two ITR sequences.

[0616] In some embodiments, a payload construct further comprises a nucleic acid sequence encoding a peptide that binds to the cation-independent mannose 6-phosphate (M6P) receptor (CI-MPR) with high affinity, as described in Int'l Pat. App. Pub. No. WO2019213180A1, the disclosure of which is incorporated herein by reference in its entirety. The peptide that binds CI-MPR can be, e.g., an IGF2 peptide or variant thereof. Binding of CI-MPR can facilitate cellular uptake or delivery and intracellular or sub-cellular targeting of therapeutic proteins provided by gene therapy vectors.

### Payload Component: Linker

[0617] In some embodiments, a viral genome described herein may be engineered with one or more spacer or linker regions to separate coding or non-coding regions.

[0618] In some embodiments, the nucleic acid comprising a transgene encoding the payload, e.g., a GBA protein described herein, further comprises a nucleic acid sequence encoding a linker. In some embodiments, the nucleic acid encoding the payload encodes two or more linkers. In some embodiments, the encoded linker comprises a linker provided in Table 2 or 5. In some embodiments, the encoded linker comprises an amino acid sequence encoded by any one of the nucleotide sequences provided in Table 2 or 5, or an amino acid sequence with at least 70%, 75%, 80%, 85%, 90%, 95%, or 99% sequence identity thereto. In some embodiments, the nucleic acid sequence encoding the linker comprises any one of the nucleotide sequences provided in Table 2 or 5, or a nucleotide sequence with at least 70%, 75%, 80%, 85%, 90%, 95%, or 99% sequence identity thereto. In some embodiments, the linker comprises any one of the amino acid sequences provided in Table 2, or an amino acid sequence

[0619] In some embodiments, the linker may be a peptide linker that may be used to connect the polypeptides encoded by the payload region during expression. In some embodiments, a peptide linkers may be cleaved after expression to separate GCase protein domains, or to separate GCase proteins from an enhancement element described herein, e.g., a prosaposin, SapA and/or SapC protein or functional variant, allowing expression of independent functional GCase protein and enhancement element polypeptide, e.g., a prosaposin, SapA, and/or SapC polypeptides, and other payload polypeptides. Linker cleavage may be enzymatic. In some cases, linkers comprise an enzymatic cleavage site to facilitate intracellular or extracellular cleavage. Some payload regions encode linkers that interrupt polypeptide synthesis during translation of the linker sequence from an mRNA transcript. Such linkers may facilitate the translation of separate protein domains from a single transcript. In some cases, two or more linkers are encoded by a payload region of the viral genome.

TABLE 2
Linkers

| Linker ID | Description | Length | SEQ ID NO |
|---|---|---|---|
| Linker1 | Furin | 12 | 1724 |
| Linker2 | Furin | 12 | 1725 |
| Linker3 | T2A | 54 | 1726 |
| Linker4 | F2A | 75 | 1727 |
| Linker5 | P2A | 66 | 1728 |
| Linker6 | G4S | 18 | 1729 |
| Linker7 | G4S3 | 45 | 1730 |
| Linker8 | G4S5 | 75 | 1731 |
| Linker9 | IRES | 609 | 1732 |
| Linker10 | IRES-2 | 623 | 1733 |
| Linker11 | hIgG2 hinge | 54 | 1734 |
| Linker12 | hIgG3 hinge | 108 | 1735 |
| Linker13 | hIgG3-2 hinge | 153 | 1736 |
| Linker14 | hIgG3-3 hinge | 198 | 1737 |
| Linker15 | msiGG-1 hinge | 45 | 1738 |
| Linker16 | msiGG1 hinge | 18 | 1739 |
| Linker17 | G4S3 | 45 | 1873 |

[0620] In some embodiments, the GBA protein and the enhancement element described herein can be connected directly, e.g., without a linker. In some embodiments, the GBA protein and the enhancement element described herein can be connected via a linker. In some embodiments, the linker is a cleavable linker. In some embodiments, the linker is not cleaved.

[0621] In some embodiments, any of the payloads described herein, can have a linker, e.g. a flexible polypeptide linker, of varying lengths, connecting the GBA protein and the enhancement element, e.g., the cell penetrating peptide, e.g., a ApoEII peptide, a TAT peptide, and/or a ApoB peptide. For example, a (Gly4Ser)n linker (SEQ ID NO: 1872), wherein n is 0, 1, 2, 3, 4, 5, 6, 7, or 8 can be used (e.g., any one of SEQ ID NOs: 1729, 1730, 1731, 1843, or 1845). In some embodiments, the linker comprises a (Gly4Ser)3 (SEQ ID NO: 1845). In some embodiments, the nucleotide sequence encoding the linker comprises the nucleotide sequence of SEQ ID NO: 1730, or a nucleotide sequence having at least one, two, or three but no more than four modifications, e.g., substitutions, relative to SEQ ID NO: 1730. In some embodiments, the encoded linker comprises the amino acid sequence of SEQ ID NO: 1845, or an amino acid sequence having at least one, two, or three but no more than four modifications, e.g., substitutions, relative to SEQ ID NO: 1845.

[0622] In some embodiments, the encoded linker comprises an enzymatic cleavage site, e.g., for intracellular and/or extracellular cleavage. In some embodiments, the linker is cleaved to separate the GBA protein and the encoded enhancement element, e.g., a prosaposin polypeptide, a SapA polypeptide, a SapC polypeptide, or functional variant thereof. In some embodiments, the encoded linker comprises a furin linker or a functional variant. In some embodiments, the nucleotide sequence encoding the furin linker comprises the nucleotide sequence of SEQ ID NO: 1724, a nucleotide sequence with at least 70%, 75%, 80%, 85%, 90%, 95%, or 99% sequence identity to SEQ ID NO: 1724, or a nucleotide sequence having at least one, two, or three but no more than four modifications, e.g., substitutions, relative to SEQ ID NO: 1724. In some embodiments, the furin linker comprises the amino acid sequence of SEQ ID NO: 1854, or an amino acid sequence having at least one, two, or three but no more than four modifications, e.g., substitutions, relative to SEQ ID NO: 1854. In some embodiments, furin cleaves proteins downstream of a basic amino acid target sequence (e.g., Arg-X-(Arg/Lys)-Arg) (e.g., as described in Thomas, G., 2002. Nature Reviews Molecular Cell Biology 3(10): 753-66; the contents of which are herein incorporated by reference in its entirety). In some embodiments, the encoded linker comprises a 2A self-cleaving peptide (e.g., a 2A peptide derived from foot-and-mouth disease virus (F2A), porcine teschovirus-1 (P2A), Thoseaasigna virus (T2A), or equine rhinitis A virus (E2A)). In some embodiments, the encoded linker comprises a T2A self-cleaving peptide linker. In some embodiments, the nucleotide sequence encoding the T2A linker comprises the nucleotide sequence of SEQ ID NO: 1726, a nucleotide sequence with at least 70%, 75%, 80%, 85%, 90%, 95%, or 99% sequence identity to SEQ ID NO: 1726, or a nucleotide sequence having at least one, two, or three but no more than four modifications, e.g., substitutions, relative to SEQ ID NO: 1726. In some embodiments, the T2A linker comprises the amino acid sequence of SEQ ID NO: 1855, or an amino acid sequence having at least one, two, or three but no more than four modifications, e.g., substitutions, relative to SEQ ID NO: 1855. In some embodiments, the nucleic acid encoding the payload encodes a furin linker and a T2A linker.

[0623] In some embodiments, the encoded linker comprises an internal ribosomal entry site (IRES) is a nucleotide sequence (>500 nucleotides) for initiation of translation in the middle of a nucleotide sequence, e.g., an mRNA sequence (Kim, J. H. et al., 2011. PLoS One 6(4): e18556; the contents of which are herein incorporated by reference in its entirety), which can be used, for example, to modulate expression of one or more transgenes. In some embodiments, the encode linker comprises a small and unbranched serine-rich peptide linker, such as those described by Huston et al. in U.S. Pat. No. 5,525,491, the contents of which are herein incorporated in their entirety. In some embodiments, polypeptides comprising a serine-rich linker has increased solubility. In some embodiments, the encoded linker comprises an artificial linker, such as those described by Whitlow and Filpula in U.S. Pat. No. 5,856,456 and Ladner et al. in U.S. Pat. No. 4,946,778, the contents of each of which are herein incorporated by their entirety.

[0624] In some embodiments, the encoded linkers comprises a cathepsin, a matrix metalloproteinases or a legumain cleavage sites, such as those described e.g. by Cizeau and Macdonald in International Publication No. WO2008052322, the contents of which are herein incorporated in their entirety.

[0625] In some embodiments, the nucleotide sequence encoding the linker comprises about 10 to about 700 nucleotides in length, e.g., about 10 to about 700 nucleotides, e.g. about 10 to about 100, e.g., about 50-200 nucleotides, about 150-300 nucleotides, about 250-400 nucleotides, about 350-500 nucleotides, about 450-600 nucleotides, about 550-700 nucleotides, about 650-700 nucleotides. In some embodiments, the nucleotide sequence encoding the linker comprises about 5 to about 20 nucleotides in length, e.g., about 12 nucleotides in length. In some embodiments, the nucleotide sequence encoding the linker comprises about 40 to about 60 nucleotides in length, e.g., about 54 nucleotides in length.

### Payload Component: Signal Sequence

[0626] In some embodiments, the nucleic acid sequence comprising the transgene encoding the payload, e.g., a GBA protein, an enhancement element (e.g., a prosaposin protein, saposin C protein, or variant thereof; a cell penetrating peptide (e.g., a ApoEII peptide, a TAT peptide, and/or an ApoB protein), or a lysosomal targeting signal), or a GBA protein and an enhancement element, comprises a nucleic acid sequence encoding a signal sequence (e.g., a signal sequence region herein). In some embodiments, the nucleic acid sequence comprising the transgene encoding the payload comprises two signal sequence regions. In some embodiments, the nucleic acid sequence comprising the transgene encoding the payload comprises three or more signal sequence regions.

[0627] In some embodiments, the nucleotide sequence encoding the signal sequence is located 5′ relative to the nucleotide sequence encoding the GBA protein. In some embodiments, the nucleotide sequence encoding the signal sequence is located 5′ relative to the nucleotide sequence encoding the enhancement element. In some embodiments, the encoded GBA protein and/or the encoded enhancement element comprises a signal sequence at the N-terminus, wherein the signal sequence is optionally cleaved during cellular processing and/or localization of the GBA protein and/or the enhancement element.

[0628] In some embodiments, the signal sequence comprises the sequence any one of the signal sequences provided in Table 4 or 14 or a sequence substantially identical (e.g., having at least 70%, 75%, 80%, 85%, 90%, 95%, or 99% identity) thereto. In some embodiments, the encoded signal sequence comprises the amino acid sequence of SEQ ID NO: 1853 or 1857, or an amino acid sequence at least 85% (e.g., at least 90%, 92%, 95%, 97%, 98%, or 99%) identical thereto. In some embodiments, the nucleotide sequence encoding the signal sequence comprises of any of SEQ ID NOs: 1850-1852 or 1856, or a nucleotide sequence at least 85% (e.g., at least 90%, 92%, 95%, 97%, 98%, or 99%) identical thereto.

[0629] In some embodiments, the encoded signal sequence comprises the amino acid sequence of SEQ ID NO: 1853 or an amino acid sequence at least 85% (e.g., at least 90%, 92%, 95%, 97%, 98%, or 99%) identical thereto; and the encoded GBA protein comprises the amino acid sequence of SEQ ID NO: 1775, or an amino acid sequence at least 70% (e.g., at least 75%, 80%, 85%, 90%, 92%, 95%, 97%, 98%, or 99%) identical thereto. In some embodiments, the encoded signal sequence is located N-terminal relative to the encoded GBA protein.

[0630] In some embodiments, the nucleotide sequence encoding the signal sequence comprises the nucleotide sequence of 1850 or a nucleotide sequence at least 85% (e.g., at least 90%, 92%, 95%, 97%, 98%, or 99%) identical thereto, and the nucleotide sequence encoding the GBA protein comprises the nucleotide sequence of SEQ ID NO: 1773, or a nucleotide sequence at least 70% (e.g., at least 75%, 80%, 85%, 90%, 92%, 95%, 97%, 98%, or 99%) identical thereto. In some embodiments, the nucleotide sequence encoding the signal sequence comprises the nucleotide sequence of 1851 or a nucleotide sequence at least 85% (e.g., at least 90%, 92%, 95%, 97%, 98%, or 99%) identical thereto, and the nucleotide sequence encoding the GBA protein comprises the nucleotide sequence of SEQ ID NO: 1777, or a nucleotide sequence at least 70% (e.g., at least 75%, 80%, 85%, 90%, 92%, 95%, 97%, 98%, or 99%) identical thereto. In some embodiments, the nucleotide sequence encoding the signal sequence comprises the nucleotide sequence of 1852 or a nucleotide sequence at least 85% (e.g., at least 90%, 92%, 95%, 97%, 98%, or 99%) identical thereto, and the nucleotide sequence encoding the GBA protein comprises the nucleotide sequence of SEQ ID NO: 1781, or a nucleotide sequence at least 70% (e.g., at least 75%, 80%, 85%, 90%, 92%, 95%, 97%, 98%, or 99%) identical thereto. In some embodiments, the nucleotide sequence encoding the signal sequence is located 5′ relative to the nucleotide sequence encoding the GBA protein.

### Exemplary GCase (GBA) Protein Payload

[0631] In some embodiments, the payload, e.g., of a viral genome described herein, is a GCase protein, e.g., a wild-type GCase protein, or a functional variant thereof. In some embodiments, a functional variant is a variant that retains some or all of the activity of its wild-type counterpart, so as to achieve a desired therapeutic effect. For example, in some embodiments, a functional variant is effective to be used in gene therapy to treat a disorder or condition, for example, a GBA gene product deficiency, PD, or a GBA-related disorders, a neurodegenerative disorder, and/or a neuromuscular disorder. Unless indicated otherwise, a variant of a GCase protein as described herein (e.g., in the context of the constructs, vectors, genomes, methods, kits, compositions, etc. of the disclosure) is a functional variant.

[0632] As used herein, “associated with decreased GCase protein levels” or “associated with decreased expression” means that one or more symptoms of a disease are caused by lower-than-normal GCase protein levels in a target tissue or in a biofluid such as blood. A disease or condition associated with decreased GCase protein levels or expression may be a disorder of the central nervous system. Also specifically contemplated herein are Parkinson Disease and related disorders arising from expression of defective GBA gene product, e.g., a PD associated with a GBA mutation. Such a disease or condition may be a neuromuscular or a neurological disorder or condition. For example, a disease associated with decreased GCase protein levels may be Parkinson Disease or related disorder, or may be another neurological or neuromuscular disorder described herein, e.g., a PD associated with a GBA mutation, Gaucher Disease (GD) (e.g., Type 1 GD, Type 2 GD, or Type 3 GD, dementia with Lewy Bodies (DLB), Gaucher disease (GD), Spinal muscular atrophy (SMA), Multiple System Atrophy (MSA), or Multiple sclerosis (MS).

[0633] The present disclosure addresses the need for new technologies by providing GCase protein related treatment deliverable by AAV-based compositions and complexes for the treatment of GBA-related disorders.

[0634] While delivery is exemplified in the AAV context, other viral vectors, non-viral vectors, nanoparticles, or liposomes may be similarly used to deliver the therapeutic GCase protein(s) and include, but are not limited to, vector genomes of any of the AAV serotypes or other viral delivery vehicles or lentivirus, etc. The observations and teachings extend to any macromolecular structure, including modified cells, introduced into the CNS in the manner as described herein.

[0635] Given in Table 3 are the sequence identifiers of exemplary polynucleotide and polypeptide sequences for GCase proteins that may be used in the viral genomes disclosed herein and which may constitute a GCase protein payload. Functional variants, e.g., those retaining at least about 90% or at least 95% sequence identity to a sequence shown in Table 3, may also be used. In some embodiments, a codon-optimized and other variants that encode the same or essentially the same GCase protein amino acid sequence (e.g., those having at least about 90% amino acid sequence identity) may also be used.

[0636] In some embodiments, the viral genome comprises a nucleic acid comprising a transgene encoding a GBA protein, or functional variant thereof. In some embodiments, the encoded GBA protein, or functional variant thereof comprises an amino acid sequence from a GBA protein described herein, e.g., as described in Table 3 or 15, or an amino acid sequence substantially identical (e.g., having at least about 70%, 75%, 80%, 85%, 90%, 92%, 95%, 97%, 98%, or 99% sequence identity) to any of the aforesaid sequences. In some embodiments, the encoded GBA protein or functional variant thereof comprises an amino acid sequence from an GBA protein described herein, e.g., as described in Table 3 or 15, or an amino acid sequence having at least one, two or three modifications but not more than 30, 20 or 10 modifications relative to any of the aforesaid amino acid sequences. In some embodiments, the encoded GBA protein or functional variant thereof, comprises an amino acid sequence encoded by a nucleotide sequence encoding a GBA protein described herein, e.g., as described in Table 3 or 15, or a nucleotide sequence substantially identical (e.g., having at least about 70%, 75%, 80%, 85%, 90%, 92%, 95%, 97%, 98%, or 99% sequence identity) to any of the aforesaid sequences.

[0637] In some embodiments, the nucleotide sequence encoding the GBA protein or functional variant thereof comprises a nucleotide sequence encoding a GBA protein described herein, e.g., as described in Table 3 or 15, or a nucleotide sequence substantially identical (e.g., having at least about 70%, 75%, 80%, 85%, 90%, 92%, 95%, 97%, 98%, or 99% sequence identity) to any of the aforesaid sequences. In some embodiments, the nucleotide sequence encoding the GBA protein or functional variant thereof comprises a nucleotide sequence encoding a GBA protein described herein, e.g., as described in Table 3 or 15, or a nucleotide sequence having at least one, two or three modifications but not more than 30, 20 or 10 modifications relative to any of the aforesaid nucleotide sequences. In some embodiments, the nucleotide sequence encoding a GBA protein or functional variant thereof is a codon optimized nucleotide sequence.

TABLE 3
Exemplary GCase Sequences

| SEQ ID NO: | Type | Species | Description |
|---|---|---|---|
| 1740 | Protein | Homo sapiens | GBA protein NP_000148.2 |
| 1741 | DNA | Homo sapiens | GBA mRNA transcript variant 1 |
| | | | NM_000157.4 |
| 1742 | Protein | Homo sapiens | GBA protein NP_001005741.1 |
| 1743 | DNA | Homo sapiens | GBA mRNA transcript variant 2 |
| | | | NM_01005741.3 |
| 1744 | Protein | Homo sapiens | GBA protein NP_001005742.1 |
| 1745 | DNA | Homo sapiens | GBA mRNA transcript variant 3 |
| | | | NM_001005742.3 |
| 1746 | Protein | Homo sapiens | GBA protein NP_001165282.1 |
| 1747 | DNA | Homo sapiens | GBA mRNA transcript variant 4 |
| | | | NM_001171811.2 |
| 1748 | Protein | Homo sapiens | GBA protein NP_001165283.1 |
| 1749 | DNA | Homo sapiens | GBA mRNA transcript variant 5 |
| | | | NM_001171812.2 |

TABLE 15
Exemplary GCase Sequences

| | | SEQ |
|---|---|---|
| | | ID |
| Description | Sequence | NO: |
| GBA Variant 1 | ATGGAATTCTCTAGCCCATCTAGAGAGGAATGTCCTAAGCCTCTGTCAA | 1772 |
| (signal | GAGTGTCCATCATGGCCGGCAGCCTGACAGGCCTGCTGCTGCTGCAGGC | |
| sequence | CGTGTCCTGGGCCAGTGGAGCCCGGCCCTGCATCCCTAAGTCCTTCGGC | |
| underlined)-nt | TATTCTAGCGTGGTCTGCGTGTGTAATGCCACTTACTGCGACAGCTTCG | |
| | ACCCTCCTACCTTCCCCGCCCTTGGAACATTCAGCAGATACGAGAGCAC | |
| | CAGAAGCGGCAGAAGAATGGAACTGAGCATGGGCCCAATCCAGGCCAAC | |
| | CACACCGGCACCGGCCTGCTGCTGACACTGCAACCTGAGCAGAAGTTCC | |
| | AGAAGGTGAAGGGATTTGGAGGCGCCATGACCGACGCTGCTGCTCTGAA | |
| | CATCCTGGCCCTCTCCCCACCTGCTCAGAACCTGCTGCTTAAAAGCTAC | |
| | TTCAGCGAGGAAGGCATCGGCTATAACATCATCAGAGTGCCCATGGCCA | |
| | GCTGCGACTTCAGCATCAGAACATACACCTACGCCGATACACCTGATGA | |
| | CTTCCAACTGCACAACTTCAGCCTGCCTGAAGAGGACACAAAGCTGAAA | |
| | ATCCCCCTGATCCACCGGGCCCTGCAGCTGGCCCAGAGACCTGTGAGCC | |
| | TGCTGGCCTCTCCTTGGACAAGCCCCACCTGGCTGAAGACCAATGGAGC | |
| | TGTGAACGGCAAGGGCAGCCTGAAGGGCCAGCCCGGCGACATCTACCAC | |
| | CAAACCTGGGCTCGCTACTTCGTGAAATTCCTGGACGCCTACGCTGAGC | |
| | ATAAGCTGCAATTTTGGGCCGTTACAGCCGAGAACGAGCCTTCTGCCGG | |
| | CCTGCTGTCTGGATATCCTTTCCAGTGCCTGGGCTTCACCCCTGAGCAC | |
| | CAGAGAGACTTTATCGCCAGAGATCTGGGGCCTACCCTGGCTAACAGCA | |
| | CACACCACAACGTGCGGCTGCTGATGCTGGACGATCAGAGGCTGCTGCT | |
| | CCCCCACTGGGCCAAGGTGGTGCTGACAGATCCGGAGGCCGCCAAATAC | |
| | GTGCACGGCATCGCCGTCCACTGGTACCTGGATTTCCTGGCCCCTGCCA | |
| | AGGCCACCCTGGGCGAGACACATAGACTGTTTCCTAATACCATGCTGTT | |
| | CGCCAGCGAGGCCTGCGTGGGCAGCAAGTTCTGGGAACAGAGCGTGCGG | |
| | CTGGGCAGCTGGGACAGAGGAATGCAGTACAGCCACAGCATCATTACCA | |
| | ACCTGCTGTACCACGTGGTGGGCTGGACCGACTGGAACCTGGCCCTGAA | |
| | CCCCGAAGGCGGCCCCAACTGGGTGCGGAACTTCGTGGACTCTCCTATC | |
| | ATCGTGGATATTACCAAGGATACCTTTTACAAGCAGCCTATGTTCTACC | |
| | ACCTGGGCCACTTCAGCAAGTTCATCCCTGAGGGCTCTCAGCGGGTGGG | |
| | CCTGGTGGCCTCTCAGAAAAACGACCTGGATGCCGTTGCCCTGATGCAC | |
| | CCCGACGGCAGCGCCGTGGTGGTCGTCCTGAATAGAAGCTCCAAGGACG | |
| | TGCCTCTGACCATCAAGGACCCCGCTGTGGGATTTCTGGAAACCATCAG | |
| | CCCTGGCTACAGCATCCACACCTACCTGTGGCGGCGGCAG | |
| GBA Variant 1 | GCCCGGCCCTGCATCCCTAAGTCCTTCGGCTATTCTAGCGTGGTCTGCG | 1773 |
| (no signal | TGTGTAATGCCACTTACTGCGACAGCTTCGACCCTCCTACCTTCCCCGC | |
| sequence)-nt | CCTTGGAACATTCAGCAGATACGAGAGCACCAGAAGCGGCAGAAGAATG | |
| | GAACTGAGCATGGGCCCAATCCAGGCCAACCACACCGGCACCGGCCTGC | |
| | TGCTGACACTGCAACCTGAGCAGAAGTTCCAGAAGGTGAAGGGATTTGG | |
| | AGGCGCCATGACCGACGCTGCTGCTCTGAACATCCTGGCCCTCTCCCCA | |
| | CCTGCTCAGAACCTGCTGCTTAAAAGCTACTTCAGCGAGGAAGGCATCG | |
| | GCTATAACATCATCAGAGTGCCCATGGCCAGCTGCGACTTCAGCATCAG | |
| | AACATACACCTACGCCGATACACCTGATGACTTCCAACTGCACAACTTC | |
| | AGCCTGCCTGAAGAGGACACAAAGCTGAAAATCCCCCTGATCCACCGGG | |
| | CCCTGCAGCTGGCCCAGAGACCTGTGAGCCTGCTGGCCTCTCCTTGGAC | |
| | AAGCCCCACCTGGCTGAAGACCAATGGAGCTGTGAACGGCAAGGGCAGC | |
| | CTGAAGGGCCAGCCCGGCGACATCTACCACCAAACCTGGGCTCGCTACT | |
| | TCGTGAAATTCCTGGACGCCTACGCTGAGCATAAGCTGCAATTTTGGGC | |
| | CGTTACAGCCGAGAACGAGCCTTCTGCCGGCCTGCTGTCTGGATATCCT | |
| | TTCCAGTGCCTGGGCTTCACCCCTGAGCACCAGAGAGACTTTATCGCCA | |
| | GAGATCTGGGGCCTACCCTGGCTAACAGCACACACCACAACGTGCGGCT | |
| | GCTGATGCTGGACGATCAGAGGCTGCTGCTCCCCCACTGGGCCAAGGTG | |
| | GTGCTGACAGATCCGGAGGCCGCCAAATACGTGCACGGCATCGCCGTCC | |
| | ACTGGTACCTGGATTTCCTGGCCCCTGCCAAGGCCACCCTGGGCGAGAC | |
| | ACATAGACTGTTTCCTAATACCATGCTGTTCGCCAGCGAGGCCTGCGTG | |
| | GGCAGCAAGTTCTGGGAACAGAGCGTGCGGCTGGGCAGCTGGGACAGAG | |
| | GAATGCAGTACAGCCACAGCATCATTACCAACCTGCTGTACCACGTGGT | |
| | GGGCTGGACCGACTGGAACCTGGCCCTGAACCCCGAAGGCGGCCCCAAC | |
| | TGGGTGCGGAACTTCGTGGACTCTCCTATCATCGTGGATATTACCAAGG | |
| | ATACCTTTTACAAGCAGCCTATGTTCTACCACCTGGGCCACTTCAGCAA | |
| | GTTCATCCCTGAGGGCTCTCAGCGGGTGGGCCTGGTGGCCTCTCAGAAA | |
| | AACGACCTGGATGCCGTTGCCCTGATGCACCCCGACGGCAGCGCCGTGG | |
| | TGGTCGTCCTGAATAGAAGCTCCAAGGACGTGCCTCTGACCATCAAGGA | |
| | CCCCGCTGTGGGATTTCTGGAAACCATCAGCCCTGGCTACAGCATCCAC | |
| | ACCTACCTGTGGCGGCGGCAG | |
| GBA Variant 1 | MEFSSPSREECPKPLSRVSIMAGSLTGLLLLQAVSWASGARPCIPKSFG | 1774 |
| (signal | YSSVVCVCNATYCDSFDPPTFPALGTFSRYESTRSGRRMELSMGPIQAN | |
| sequence | HTGTGLLLTLQPEQKFQKVKGFGGAMTDAAALNILALSPPAQNLLLKSY | |
| underlined)-aa | FSEEGIGYNIIRVPMASCDFSIRTYTYADTPDDFQLHNFSLPEEDTKLK | |
| | IPLIHRALQLAQRPVSLLASPWTSPTWLKTNGAVNGKGSLKGQPGDIYH | |
| | QTWARYFVKFLDAYAEHKLQFWAVTAENEPSAGLLSGYPFQCLGFTPEH | |
| | QRDFIARDLGPTLANSTHHNVRLLMLDDQRLLLPHWAKVVLTDPEAAKY | |
| | VHGIAVHWYLDFLAPAKATLGETHRLFPNTMLFASEACVGSKFWEQSVR | |
| | LGSWDRGMQYSHSIITNLLYHVVGWTDWNLALNPEGGPNWVRNFVDSPI | |
| | IVDITKDTFYKQPMFYHLGHFSKFIPEGSQRVGLVASQKNDLDAVALMH | |
| | PDGSAVVVVLNRSSKDVPLTIKDPAVGFLETISPGYSIHTYLWRRQ | |
| GBA Variant 1 | ARPCIPKSFGYSSVVCVCNATYCDSFDPPTFPALGTFSRYESTRSGRRM | 1775 |
| (no signal | ELSMGPIQANHTGTGLLLTLQPEQKFQKVKGFGGAMTDAAALNILALSP | |
| sequence)-aa | PAQNLLLKSYFSEEGIGYNIIRVPMASCDFSIRTYTYADTPDDFQLHNF | |
| | SLPEEDTKLKIPLIHRALQLAQRPVSLLASPWTSPTWLKTNGAVNGKGS | |
| | LKGQPGDIYHQTWARYFVKFLDAYAEHKLQFWAVTAENEPSAGLLSGYP | |
| | FQCLGFTPEHQRDFIARDLGPTLANSTHHNVRLLMLDDQRLLLPHWAKV | |
| | VLTDPEAAKYVHGIAVHWYLDFLAPAKATLGETHRLFPNTMLFASEACV | |
| | GSKFWEQSVRLGSWDRGMQYSHSIITNLLYHVVGWTDWNLALNPEGGPN | |
| | WVRNFVDSPIIVDITKDTFYKQPMFYHLGHFSKFIPEGSQRVGLVASQK | |
| | NDLDAVALMHPDGSAVVVVLNRSSKDVPLTIKDPAVGFLETISPGYSIH | |
| | TYLWRRQ | |
| GBA Variant 2 | ATGGAGTTTTCAAGTCCTTCCAGAGAGGAATGTCCCAAGCCTTTGAGTA | 1776 |
| (signal | GGGTAAGCATCATGGCTGGCAGCCTCACAGGATTGCTTCTACTTCAGGC | |
| sequence | AGTGTCGTGGGCATCAGGTGCCCGCCCCTGCATCCCTAAAAGCTTCGGC | |
| underlined)-nt | TACAGCTCGGTGGTGTGTGTCTGCAATGCCACATACTGTGACTCCTTTG | |
| | ACCCCCCGACCTTTCCTGCCCTTGGTACCTTCAGCCGCTATGAGAGTAC | |
| | ACGCAGTGGGCGACGGATGGAGCTGAGTATGGGGCCCATCCAGGCTAAT | |
| | CACACGGGCACAGGCCTGCTACTGACCCTGCAGCCAGAACAGAAGTTCC | |
| | AGAAAGTGAAGGGATTTGGAGGGGCCATGACAGATGCTGCTGCTCTCAA | |
| | CATCCTTGCCCTGTCACCCCCTGCCCAAAATTTGCTACTTAAATCGTAC | |
| | TTCTCTGAAGAAGGAATCGGATATAACATCATCCGGGTACCCATGGCCA | |
| | GCTGTGACTTCTCCATCCGCACCTACACCTATGCAGACACCCCTGATGA | |
| | TTTCCAGTTGCACAACTTCAGCCTCCCAGAGGAAGATACCAAGCTCAAG | |
| | ATACCCCTGATTCACCGAGCCCTGCAGTTGGCCCAGCGTCCCGTTTCAC | |
| | TCCTTGCCAGCCCCTGGACATCACCCACTTGGCTCAAGACCAATGGAGC | |
| | GGTGAATGGGAAGGGGTCACTCAAGGGACAGCCCGGAGACATCTACCAC | |
| | CAGACCTGGGCCAGATACTTTGTGAAGTTCCTGGATGCCTATGCTGAGC | |
| | ACAAGTTACAGTTCTGGGCAGTGACAGCTGAAAATGAGCCTTCTGCTGG | |
| | GCTGTTGAGTGGATACCCCTTCCAGTGCCTGGGCTTCACCCCTGAACAT | |
| | CAGCGAGACTTCATTGCCCGTGACCTAGGTCCTACCCTCGCCAACAGTA | |
| | CTCACCACAATGTCCGCCTACTCATGCTGGATGACCAACGCTTGCTGCT | |
| | GCCCCACTGGGCAAAGGTGGTACTGACAGACCCAGAAGCAGCTAAATAT | |
| | GTTCATGGCATTGCTGTACATTGGTACCTGGACTTTCTGGCTCCAGCCA | |
| | AAGCCACCCTAGGGGAGACACACCGCCTGTTCCCCAACACCATGCTCTT | |
| | TGCCTCAGAGGCCTGTGTGGGCTCCAAGTTCTGGGAGCAGAGTGTGCGG | |
| | CTAGGCTCCTGGGATCGAGGGATGCAGTACAGCCACAGCATCATCACGA | |
| | ACCTCCTGTACCATGTGGTCGGCTGGACCGACTGGAACCTTGCCCTGAA | |
| | CCCCGAAGGAGGACCCAATTGGGTGCGTAACTTTGTCGACAGTCCCATC | |
| | ATTGTAGACATCACCAAGGACACGTTTTACAAACAGCCCATGTTCTACC | |
| | ACCTTGGCCACTTCAGCAAGTTCATTCCTGAGGGCTCCCAGAGAGTGGG | |
| | GCTGGTTGCCAGTCAGAAGAACGACCTGGACGCAGTGGCACTGATGCAT | |
| | CCCGATGGCTCTGCTGTTGTGGTCGTGCTAAACCGCTCCTCTAAGGATG | |
| | TGCCTCTTACCATCAAGGATCCTGCTGTGGGCTTCCTGGAGACAATCTC | |
| | ACCTGGCTACTCCATTCACACCTACCTGTGGCGTCGCCAG | |
| GBA Variant 2 | GCCCGCCCCTGCATCCCTAAAAGCTTCGGCTACAGCTCGGTGGTGTGTG | 1777 |
| (no signal | TCTGCAATGCCACATACTGTGACTCCTTTGACCCCCCGACCTTTCCTGC | |
| sequence)-nt | CCTTGGTACCTTCAGCCGCTATGAGAGTACACGCAGTGGGCGACGGATG | |
| | GAGCTGAGTATGGGGCCCATCCAGGCTAATCACACGGGCACAGGCCTGC | |
| | TACTGACCCTGCAGCCAGAACAGAAGTTCCAGAAAGTGAAGGGATTTGG | |
| | AGGGGCCATGACAGATGCTGCTGCTCTCAACATCCTTGCCCTGTCACCC | |
| | CCTGCCCAAAATTTGCTACTTAAATCGTACTTCTCTGAAGAAGGAATCG | |
| | GATATAACATCATCCGGGTACCCATGGCCAGCTGTGACTTCTCCATCCG | |
| | CACCTACACCTATGCAGACACCCCTGATGATTTCCAGTTGCACAACTTC | |
| | AGCCTCCCAGAGGAAGATACCAAGCTCAAGATACCCCTGATTCACCGAG | |
| | CCCTGCAGTTGGCCCAGCGTCCCGTTTCACTCCTTGCCAGCCCCTGGAC | |
| | ATCACCCACTTGGCTCAAGACCAATGGAGCGGTGAATGGGAAGGGGTCA | |
| | CTCAAGGGACAGCCCGGAGACATCTACCACCAGACCTGGGCCAGATACT | |
| | TTGTGAAGTTCCTGGATGCCTATGCTGAGCACAAGTTACAGTTCTGGGC | |
| | AGTGACAGCTGAAAATGAGCCTTCTGCTGGGCTGTTGAGTGGATACCCC | |
| | TTCCAGTGCCTGGGCTTCACCCCTGAACATCAGCGAGACTTCATTGCCC | |
| | GTGACCTAGGTCCTACCCTCGCCAACAGTACTCACCACAATGTCCGCCT | |
| | ACTCATGCTGGATGACCAACGCTTGCTGCTGCCCCACTGGGCAAAGGTG | |
| | GTACTGACAGACCCAGAAGCAGCTAAATATGTTCATGGCATTGCTGTAC | |
| | ATTGGTACCTGGACTTTCTGGCTCCAGCCAAAGCCACCCTAGGGGAGAC | |
| | ACACCGCCTGTTCCCCAACACCATGCTCTTTGCCTCAGAGGCCTGTGTG | |
| | GGCTCCAAGTTCTGGGAGCAGAGTGTGCGGCTAGGCTCCTGGGATCGAG | |
| | GGATGCAGTACAGCCACAGCATCATCACGAACCTCCTGTACCATGTGGT | |
| | CGGCTGGACCGACTGGAACCTTGCCCTGAACCCCGAAGGAGGACCCAAT | |
| | TGGGTGCGTAACTTTGTCGACAGTCCCATCATTGTAGACATCACCAAGG | |
| | ACACGTTTTACAAACAGCCCATGTTCTACCACCTTGGCCACTTCAGCAA | |
| | GTTCATTCCTGAGGGCTCCCAGAGAGTGGGGCTGGTTGCCAGTCAGAAG | |
| | AACGACCTGGACGCAGTGGCACTGATGCATCCCGATGGCTCTGCTGTTG | |
| | TGGTCGTGCTAAACCGCTCCTCTAAGGATGTGCCTCTTACCATCAAGGA | |
| | TCCTGCTGTGGGCTTCCTGGAGACAATCTCACCTGGCTACTCCATTCAC | |
| | ACCTACCTGTGGCGTCGCCAG | |
| GBA Variant 2 | MEFSSPSREECPKPLSRVSIMAGSLTGLLLLQAVSWASGARPCIPKSFG | 1778 |
| (signal | YSSVVCVCNATYCDSFDPPTFPALGTFSRYESTRSGRRMELSMGPIQAN | |
| sequence | HTGTGLLLTLQPEQKFQKVKGFGGAMTDAAALNILALSPPAQNLLLKSY | |
| underlined)-aa | FSEEGIGYNIIRVPMASCDFSIRTYTYADTPDDFQLHNFSLPEEDTKLK | |
| | IPLIHRALQLAQRPVSLLASPWTSPTWLKTNGAVNGKGSLKGQPGDIYH | |
| | QTWARYFVKFLDAYAEHKLQFWAVTAENEPSAGLLSGYPFQCLGFTPEH | |
| | QRDFIARDLGPTLANSTHHNVRLLMLDDQRLLLPHWAKVVLTDPEAAKY | |
| | VHGIAVHWYLDFLAPAKATLGETHRLFPNTMLFASEACVGSKFWEQSVR | |
| | LGSWDRGMQYSHSIITNLLYHVVGWTDWNLALNPEGGPNWVRNFVDSPI | |
| | IVDITKDTFYKQPMFYHLGHFSKFIPEGSQRVGLVASQKNDLDAVALMH | |
| | PDGSAVVVVLNRSSKDVPLTIKDPAVGFLETISPGYSIHTYLWRRQ | |
| GBA Variant 2 | ARPCIPKSFGYSSVVCVCNATYCDSFDPPTFPALGTFSRYESTRSGRRM | 1779 |
| (no signal | ELSMGPIQANHTGTGLLLTLQPEQKFQKVKGFGGAMTDAAALNILALSP | |
| sequence)-aa | PAQNLLLKSYFSEEGIGYNIIRVPMASCDFSIRTYTYADTPDDFQLHNF | |
| | SLPEEDTKLKIPLIHRALQLAQRPVSLLASPWTSPTWLKTNGAVNGKGS | |
| | LKGQPGDIYHQTWARYFVKFLDAYAEHKLQFWAVTAENEPSAGLLSGYP | |
| | FQCLGFTPEHQRDFIARDLGPTLANSTHHNVRLLMLDDQRLLLPHWAKV | |
| | VLTDPEAAKYVHGIAVHWYLDFLAPAKATLGETHRLFPNTMLFASEACV | |
| | GSKFWEQSVRLGSWDRGMQYSHSIITNLLYHVVGWTDWNLALNPEGGPN | |
| | WVRNFVDSPIIVDITKDTFYKQPMFYHLGHFSKFIPEGSQRVGLVASQK | |
| | NDLDAVALMHPDGSAVVVVLNRSSKDVPLTIKDPAVGFLETISPGYSIH | |
| | TYLWRRQ | |
| GBA Variant 3 | atggaattcagcagccccagcagagaggaatgccccaagcctctgagcc | 1780 |
| (signal | gggtgtcaatcatggccggatctctgacaggactgctgctgcttcaggc | |
| sequence | cgtgtcttgggcttctggcgctagaccttgcatccccaagagcttcggc | |
| underlined)-nt | tacagcagcgtcgtgtgcgtgtgcaatgccacctactgcgacagcttcg | |
| | accctcctacctttcctgctctgggcaccttcagcagatacgagagcac | |
| | cagatccggcagacggatggaactgagcatgggacccatccaggccaat | |
| | cacacaggcactggcctgctgctgacactgcagcctgagcagaaattcc | |
| | agaaagtgaaaggcttcggcggagccatgacagatgccgccgctctgaa | |
| | tatcctggctctgtctccaccagctcagaacctgctgctcaagagctac | |
| | ttcagcgaggaaggcatcggctacaacatcatcagagtgcccatggcca | |
| | gctgcgacttcagcatcaggacctacacctacgccgacacacccgacga | |
| | tttccagctgcacaacttcagcctgcctgaagaggacaccaagctgaag | |
| | atccctctgatccacagagccctgcagctggcacaaagacccgtgtcac | |
| | tgctggcctctccatggacatctcccacctggctgaaaacaaatggcgc | |
| | cgtgaatggcaagggcagcctgaaaggccaacctggcgacatctaccac | |
| | cagacctgggccagatacttcgtgaagttcctggacgcctatgccgagc | |
| | acaagctgcagttttgggccgtgacagccgagaacgaaccttctgctgg | |
| | actgctgagcggctacccctttcagtgcctgggctttacacccgagcac | |
| | cagcgggactttatcgcccgtgatctgggacccacactggccaatagca | |
| | cccaccataatgtgcggctgctgatgctggacgaccagagactgcttct | |
| | gccccactgggctaaagtggtgctgacagatcctgaggccgccaaatac | |
| | gtgcacggaatcgccgtgcactggtatctggactttctggcccctgcca | |
| | aggccacactgggagagacacacagactgttccccaacaccatgctgtt | |
| | cgccagcgaagcctgtgtgggcagcaagttttgggaacagagcgtgcgg | |
| | ctcggcagctgggatagaggcatgcagtacagccacagcatcatcacca | |
| | acctgctgtaccacgtcgtcggctggaccgactggaatctggccctgaa | |
| | tcctgaaggcggccctaactgggtccgaaacttcgtggacagccccatc | |
| | atcgtggacatcaccaaggacaccttctacaagcagcccatgttctacc | |
| | acctgggacacttcagcaagttcatccccgagggctctcagcgcgttgg | |
| | actggtggcttcccagaagaacgatctggacgccgtggctctgatgcac | |
| | cctgatggatctgctgtggtggtggtcctgaaccgcagcagcaaagatg | |
| | tgcccctgaccatcaaggatcccgccgtgggattcctggaaacaatcag | |
| | ccctggctactccatccacacctacctgtggcgtagacag | |
| GBA Variant 3 | gctagaccttgcatccccaagagcttcggctacagcagcgtcgtgtgcg | 1781 |
| (no signal | tgtgcaatgccacctactgcgacagcttcgaccctcctacctttcctgc | |
| sequence)-nt | tctgggcaccttcagcagatacgagagcaccagatccggcagacggatg | |
| | gaactgagcatgggacccatccaggccaatcacacaggcactggcctgc | |
| | tgctgacactgcagcctgagcagaaattccagaaagtgaaaggcttcgg | |
| | cggagccatgacagatgccgccgctctgaatatcctggctctgtctcca | |
| | ccagctcagaacctgctgctcaagagctacttcagcgaggaaggcatcg | |
| | gctacaacatcatcagagtgcccatggccagctgcgacttcagcatcag | |
| | gacctacacctacgccgacacacccgacgatttccagctgcacaacttc | |
| | agcctgcctgaagaggacaccaagctgaagatccctctgatccacagag | |
| | ccctgcagctggcacaaagacccgtgtcactgctggcctctccatggac | |
| | atctcccacctggctgaaaacaaatggcgccgtgaatggcaagggcagc | |
| | ctgaaaggccaacctggcgacatctaccaccagacctgggccagatact | |
| | tcgtgaagttcctggacgcctatgccgagcacaagctgcagttttgggc | |
| | cgtgacagccgagaacgaaccttctgctggactgctgagcggctacccc | |
| | tttcagtgcctgggctttacacccgagcaccagcgggactttatcgccc | |
| | gtgatctgggacccacactggccaatagcacccaccataatgtgcggct | |
| | gctgatgctggacgaccagagactgcttctgccccactgggctaaagtg | |
| | gtgctgacagatcctgaggccgccaaatacgtgcacggaatcgccgtgc | |
| | actggtatctggactttctggcccctgccaaggccacactgggagagac | |
| | acacagactgttccccaacaccatgctgttcgccagcgaagcctgtgtg | |
| | ggcagcaagttttgggaacagagcgtgcggctcggcagctgggatagag | |
| | gcatgcagtacagccacagcatcatcaccaacctgctgtaccacgtcgt | |
| | cggctggaccgactggaatctggccctgaatcctgaaggcggccctaac | |
| | tgggtccgaaacttcgtggacagccccatcatcgtggacatcaccaagg | |
| | acaccttctacaagcagcccatgttctaccacctgggacacttcagcaa | |
| | gttcatccccgagggctctcagcgcgttggactggtggcttcccagaag | |
| | aacgatctggacgccgtggctctgatgcaccctgatggatctgctgtgg | |
| | tggtggtcctgaaccgcagcagcaaagatgtgcccctgaccatcaagga | |
| | tcccgccgtgggattcctggaaacaatcagccctggctactccatccac | |
| | acctacctgtggcgtagacag | |
| GBA Variant 3 | MEFSSPSREECPKPLSRVSIMAGSLTGLLLLQAVSWASGARPCIPKSFG | 1782 |
| (signal | YSSVVCVCNATYCDSFDPPTFPALGTFSRYESTRSGRRMELSMGPIQAN | |
| sequence | HTGTGLLLTLQPEQKFQKVKGFGGAMTDAAALNILALSPPAQNLLLKSY | |
| underlined)-aa | FSEEGIGYNIIRVPMASCDFSIRTYTYADTPDDFQLHNFSLPEEDTKLK | |
| | IPLIHRALQLAQRPVSLLASPWTSPTWLKTNGAVNGKGSLKGQPGDIYH | |
| | QTWARYFVKFLDAYAEHKLQFWAVTAENEPSAGLLSGYPFQCLGFTPEH | |
| | QRDFIARDLGPTLANSTHHNVRLLMLDDQRLLLPHWAKVVLTDPEAAKY | |
| | VHGIAVHWYLDFLAPAKATLGETHRLFPNTMLFASEACVGSKFWEQSVR | |
| | LGSWDRGMQYSHSIITNLLYHVVGWTDWNLALNPEGGPNWVRNFVDSPI | |
| | IVDITKDTFYKQPMFYHLGHFSKFIPEGSQRVGLVASQKNDLDAVALMH | |
| | PDGSAVVVVLNRSSKDVPLTIKDPAVGFLETISPGYSIHTYLWRRQ | |
| GBA Variant 3 | ARPCIPKSFGYSSVVCVCNATYCDSFDPPTFPALGTFSRYESTRSGRRM | 1783 |
| (no signal | ELSMGPIQANHTGTGLLLTLQPEQKFQKVKGFGGAMTDAAALNILALSP | |
| sequence)-aa | PAQNLLLKSYFSEEGIGYNIIRVPMASCDFSIRTYTYADTPDDFQLHNF | |
| | SLPEEDTKLKIPLIHRALQLAQRPVSLLASPWTSPTWLKTNGAVNGKGS | |
| | LKGQPGDIYHQTWARYFVKFLDAYAEHKLQFWAVTAENEPSAGLLSGYP | |
| | FQCLGFTPEHQRDFIARDLGPTLANSTHHNVRLLMLDDQRLLLPHWAKV | |
| | VLTDPEAAKYVHGIAVHWYLDFLAPAKATLGETHRLFPNTMLFASEACV | |
| | GSKFWEQSVRLGSWDRGMQYSHSIITNLLYHVVGWTDWNLALNPEGGPN | |
| | WVRNFVDSPIIVDITKDTFYKQPMFYHLGHFSKFIPEGSQRVGLVASQK | |
| | NDLDAVALMHPDGSAVVVVLNRSSKDVPLTIKDPAVGFLETISPGYSIH | |
| | TYLWRRQ | |

[0638] In some embodiments, the encoded GBA protein or functional variant thereof comprises the amino acid sequence of any one of SEQ ID NOs: 1740, 1742, 1744, 1746, 1748, 1774, 1775, 1778, 1779, 1782, or 1783, or an amino acid sequence substantially identical (e.g., having at least about 70%, 75%, 80%, 85%, 90%, 92%, 95%, 97%, 98%, or 99% sequence identity) to any of the aforesaid sequences. In some embodiments, the encoded GBA protein or functional variant thereof comprises the amino acid sequence of any one of SEQ ID NOs: 1740, 1742, 1744, 1746, 1748, 1774, 1775, 1778, 1779, 1782, or 1783, or an amino acid having at least one, two or three modifications but not more than 30, 20 or 10 modifications relative to any of the aforesaid amino acid sequences. In some embodiments, the encoded GBA protein or functional variant thereof comprises an amino acid sequence encoded by the nucleotide sequence of any of SEQ ID NOs: 1741, 1743, 1744, 1745, 1747, 1749, 1772, 1773, 1776, 1777, 1780, or 1781, or a nucleotide sequence substantially identical (e.g., having at least about 70%, 75%, 80%, 85%, 90%, 92%, 95%, 97%, 98%, or 99% sequence identity) to any of the aforesaid sequences.

[0639] In some embodiments, the nucleotide sequence encoding the GBA protein or functional variant thereof comprises the nucleotide sequence of any one of SEQ ID NOs: 1741, 1743, 1744, 1745, 1747, 1749, 1772, 1773, 1776, 1777, 1780, or 1781, or a nucleotide sequence substantially identical (e.g., having at least about 70%, 75%, 80%, 85%, 90%, 92%, 95%, 97%, 98%, or 99% sequence identity) to any of the aforesaid sequences. In some embodiments, the nucleic acid sequence encoding the GBA protein or functional variant thereof comprises the nucleotide sequence of any one of SEQ ID NOs: 1741, 1743, 1744, 1745, 1747, 1749, 1772, 1773, 1776, 1777, 1780, or 1781, or a nucleotide sequence having at least one, two or three modifications but not more than 30, 20 or 10 modifications relative to any of the aforesaid nucleotide sequences. In some embodiments, the nucleotide sequence encoding the GBA protein or functional variant thereof comprises the nucleotide sequence of SEQ ID NO: 1773, a nucleotide sequence substantially identical (e.g., having at least about 70%, 75%, 80%, 85%, 90%, 92%, 95%, 97%, 98%, or 99% sequence identity) to SEQ ID NO: 1773, or a nucleotide sequence having at least one, two or three modifications but not more than 30, 20 or 10 modifications relative to SEQ ID NO: 1773. In some embodiments, the nucleotide sequence encoding the GBA protein or functional variant thereof does not comprise a stop codon. In some embodiments, the nucleotide sequence encoding the GBA protein of functional variant thereof is a codon optimized nucleotide sequence.

[0640] In some embodiments, a codon optimized nucleotide sequence encoding a GBA protein described herein (e.g., SEQ ID NO: 1773) replaces a donor splice site, e.g., a nucleotide sequence comprising the sequence of AGGGTAAGC or nucleotides 49 of the 117 numbered according to the nucleotide sequence of SEQ ID NO: 1776, with the nucleotide sequence of AGAGTGTCC, e.g., comprising at least one, two, three, or four modifications, e.g., mutations relative to the nucleotide sequence of AGGGTAAGC, or nucleotides 49 of the 117 numbered according to the nucleotide sequence of SEQ ID NO: 1776. In some embodiments, a codon optimized nucleotide sequence encoding a GBA protein described herein (e.g., SEQ ID NO: 1773) contains more than 121, 122, 123, 124, 125, 126, 127, 128, 129, 130, 131, 132, 133, 134, 135, 136, 137, 138, 139, 140 or more unique modifications, e.g., mutations, compared to the nucleotide sequence of SEQ ID NO: 1776. In some embodiments, a codon optimized nucleotide sequence of a GBA protein described herein (e.g., SEQ ID NO: 1773) comprises a unique GC content profile. Without wishing to be bound by theory, it is believed in some embodiments, that altering the GC-content of a nucleotide sequence of a GBA protein described herein enhances the expression of the codon optimized nucleotide sequence in a cell (e.g., a human cell or a neuronal cell).

[0641] In some embodiments, the viral genome comprises a payload region encoding a GCase protein. The encoded GCase protein may be derived from any species, such as, but not limited to human, non-human primate, or rodent.

[0642] In some embodiments, the viral genome comprises a payload region encoding a human (Homo sapiens) GCase protein, or a variant thereof.

[0643] Various embodiments of the disclosure herein provide an adeno-associated viral (AAV) particle comprising a viral genome, the viral genome comprising at least one inverted terminal repeat region and a nucleic acid sequence encoding a polypeptide having at least 90% sequence identity to a human GCase protein sequence, or a fragment thereof, as provided in Table 3. In some embodiments, the AAV viral genome comprises at least one inverted terminal repeat region and a nucleic acid sequence encoding a polypeptide having at least 95% sequence identity to a GCase protein sequence, or a fragment thereof, as provided in Table 3. In some embodiments, the AAV viral genome comprises at least one inverted terminal repeat region and a nucleic acid sequence encoding a polypeptide having at least 98% sequence identity to a GCase protein sequence, or a fragment thereof, as provided in Table 3. In some embodiments, the AAV viral genome comprises at least one inverted terminal repeat region and a nucleic acid sequence encoding a polypeptide having at least 99% sequence identity to a GCase protein sequence, or a fragment thereof, as provided in Table 3. In some embodiments, the AAV viral genome comprises at least one inverted terminal repeat region and a nucleic acid sequence encoding a GCase protein sequence, or a fragment thereof, provided in Table 3.

[0644] In some embodiments, the viral genome comprises a nucleic acid sequence encoding a recombinant glucocerebrosidase according to Imiglucerase (Cerezyme)(Genzyme Corp.), a recombinant GCase for use in treating Gaucher disease; Velaglucerase (Vpriv)(Shire Human Genetic Therapies Inc.), a recombinant GCase for use in treating Gaucher disease; or U.S. Pat. Nos. 8,227,230, 8,741,620, or U.S. Pat. No. 8,790,641, each incorporated by reference herein, describing Taliglucerase alfa (Elelyso)(Pfizer Inc.), a recombinant GCase for use in treating Gaucher disease.

[0645] In some embodiments, the GCase protein is derived from a GBA protein encoding sequence of a non-human primate, such as the cynomolgus monkey, Macaca fascicularis. Certain embodiments provide the GCase protein as a humanized version of a Macaca fascicularis sequence.

[0646] In some embodiments, the viral genome comprises a payload region encoding a cynomolgus or crab-eating (long-tailed) macaque (Macaca fascicularis) GCase protein, or a variant thereof.

[0647] In some embodiments, the viral genome comprises a payload region encoding a rhesus macaque (Macaca mulatta) GCase protein, or a variant thereof.

[0648] In some embodiments, the GCase protein may comprise an amino acid sequence with 50%, 51%, 52%, 53%, 54%, 55%, 56%, 57%, 58%, 59%, 60%, 61%, 62%, 63%, 64%, 65%, 66%, 67%, 68%, 69%, 70%, 71%, 72%, 73%, 74%, 75%, 76%, 77%, 78%, 79%, 80%, 81%, 82%, 83%, 84%, 85%, 86%, 87%, 88%, 89%, 90%, 91%, 92%, 93%, 94%, 95%, 96%, 97%, 98%, 99%, or 100% identity to any of the those described above and provided in Table 3.

[0649] In some embodiments, the GCase protein may be encoded by a nucleic acid sequence with 50%, 51%, 52%, 53%, 54%, 55%, 56%, 57%, 58%, 59%, 60%, 61%, 62%, 63%, 64%, 65%, 66%, 67%, 68%, 69%, 70%, 71%, 72%, 73%, 74%, 75%, 76%, 77%, 78%, 79%, 80%, 81%, 82%, 83%, 84%, 85%, 86%, 87%, 88%, 89%, 90%, 91%, 92%, 93%, 94%, 95%, 96%, 97%, 98%, 99%, or 100% identity to any of the those described above and provided in Table 3.

[0650] The GCase protein payloads as described herein can encode any GCase protein, or any portion or derivative of a GCase protein, and are not limited to the GCase proteins or protein-encoding sequences provided in Table 3.

### Payload Component: Enhancement Element

[0651] In some embodiments, a viral genome described herein encoding a GBA protein comprises an enhancement element or functional variant thereof. In some embodiments, the encoded enhancement comprises a prosaposin (PSAP) protein, a saposin C (SapC) protein, or functional variant thereof; a cell penetrating peptide (e.g., a ApoEII peptide, a TAT peptide, and/or a ApoB peptide) or functional variant thereof; or a lysosomal targeting signal or functional variant thereof.

[0652] In some embodiments, the viral genome comprises a payload region further encoding a prosaposin (PSAP) protein or a saposin C (SapC) protein or functional variant thereof, e.g., as described herein, e.g., in Table 4 or 16.

TABLE 4
Exemplary PSAP and Saposin Sequences

| SEQ | | | |
|---|---|---|---|
| ID | | | |
| NO: | Type | Species | Description |
| 1750 | Pro- | Homo | Prosaposin isoform A preprotein, |
| | tein | sapiens | NP_002769.1 |
| 1751 | DNA | Homo | PSAP transcript variant 1, |
| | | sapiens | NM_002778.4 |
| 1752 | Pro- | Homo | Prosaposin isoform B preprotein, |
| | tein | sapiens | NP_001035930.1 |
| 1753 | DNA | Homo | PSAP transcript variant 2, |
| | | sapiens | NM_001042465.3 |
| 1754 | Pro- | Homo | Prosaposin isoform C preprotein, |
| | tein | sapiens | NP_001035931.1 |
| 1755 | DNA | Homo | PSAP transcript variant 3, |
| | | sapiens | NM_001042466.3 |
| 1756 | Pro- | Homo | hSapA, amino acids 60 to 140 of |
| | tein | sapiens | SEQ ID NO: 1750: |
| | | | SLPCDICKDVVTAAGDMLKDNATEEEILVYL |
| | | | EKTCDWLPKPNMSASCKEIVDSYLPVILDII |
| | | | KGEMSRPGEVCSALNLCES |
| 1757 | Pro- | Homo | hSapB, amino acids 195 to 275 |
| | tein | sapiens | of SEQ ID NO: 1750: |
| | | | GDVCQDCIQMVTDIQTAVRTNSTFVQALVEH |
| | | | VKEECDRLGPGMADICKNYISQYSEIAIQMM |
| | | | MHMQPKEICALVGFCDEVK |
| 1758 | Pro- | Homo | hSapC, amino acids 311 to 390 |
| | tein | sapiens | of SEQ ID NO: 1750: |
| | | | SDVYCEVCEFLVKEVTKLIDNNKTEKEILDA |
| | | | FDKMCSKLPKSLSEECQEVVDTYGSSILSIL |
| | | | LEEVSPELVCSMLHLCSG |
| 1784 | Pro- | Homo | hSapD, amino acids 405 to 486 |
| | tein | sapiens | of SEQ ID NO 1750: |
| | | | DGGFCEVCKKLVGYLDRNLEKNSTKQEILAA |
| | | | LEKGCSFLPDPYQKQCDQFVAEYEPVLIEIL |
| | | | VEVMDPSFVCLKIGACPSAH |
| 1856 | DNA | Homo | Signal Sequence |
| | | sapiens | atgtacgccctcttcctcctggccagcctcc |
| | | | tgggcgcggctctagcc |
| 1857 | Pro- | Homo | Signal Sequence |
| | tein | sapiens | MYALFLLASLLGAALA |

TABLE 16
Exemplary Enhancement Elements

| | | SEQ |
|---|---|---|
| | | ID |
| Description | Sequence | NO: |
| PSAP or Saposin | | |
| PSAP | atgtacgccctcttcctcctggccagcctcctgggcgcggctctagc | 1858 |
| (signal | cggcccggtccttggactgaaagaatgcaccaggggctcggcagtgt | |
| sequence | ggtgccagaatgtgaagacggcgtccgactgcggggcagtgaagcac | |
| underlined)-nt | tgcctgcagaccgtttggaacaagccaacagtgaaatcccttccctg | |
| | cgacatatgcaaagacgttgtcaccgcagctggtgatatgctgaagg | |
| | acaatgccactgaggaggagatccttgtttacttggagaagacctgt | |
| | gactggcttccgaaaccgaacatgtctgcttcatgcaaggagatagt | |
| | ggactcctacctccctgtcatcctggacatcattaaaggagaaatga | |
| | gccgtcctggggaggtgtgctctgctctcaacctctgcgagtctctc | |
| | cagaagcacctagcagagctgaatcaccagaagcagctggagtccaa | |
| | taagatcccagagctggacatgactgaggtggtggcccccttcatgg | |
| | ccaacatccctctcctcctctaccctcaggacggcccccgcagcaag | |
| | ccccagccaaaggataatggggacgtttgccaggactgcattcagat | |
| | ggtgactgacatccagactgctgtacggaccaactccacctttgtcc | |
| | aggccttggtggaacatgtcaaggaggagtgtgaccgcctgggccct | |
| | ggcatggccgacatatgcaagaactatatcagccagtattctgaaat | |
| | tgctatccagatgatgatgcacatgcaacccaaggagatctgtgcgc | |
| | tggttgggttctgtgatgaggtgaaagagatgcccatgcagactctg | |
| | gtccccgccaaagtggcctccaagaatgtcatccctgccctggaact | |
| | ggtggagcccattaagaagcacgaggtcccagcaaagtctgatgttt | |
| | actgtgaggtgtgtgaattcctggtgaaggaggtgaccaagctgatt | |
| | gacaacaacaagactgagaaagaaatactcgacgcttttgacaaaat | |
| | gtgctcgaagctgccgaagtccctgtcggaagagtgccaggaggtgg | |
| | tggacacgtacggcagctccatcctgtccatcctgctggaggaggtc | |
| | agccctgagctggtgtgcagcatgctgcacctctgctctggcacgcg | |
| | gctgcctgcactgaccgttcacgtgactcagccaaaggacggtggct | |
| | tctgcgaagtgtgcaagaagctggtgggttatttggatcgcaacctg | |
| | gagaaaaacagcaccaagcaggagatcctggctgctcttgagaaagg | |
| | ctgcagcttcctgccagacccttaccagaagcagtgtgatcagtttg | |
| | tggcagagtacgagcccgtgctgatcgagatcctggtggaggtgatg | |
| | gatccttccttcgtgtgcttgaaaattggagcctgcccctcggccca | |
| | taagcccttgttgggaactgagaagtgtatatggggcccaagctact | |
| | ggtgccagaacacagagacagcagcccagtgcaatgctgtcgagcat | |
| | tgcaaacgccatgtgtggaactag | |
| PSAP | ggcccggtccttggactgaaagaatgcaccaggggctcggcagtgtg | 1859 |
| (no signal | gtgccagaatgtgaagacggcgtccgactgcggggcagtgaagcact | |
| sequence)-nt | gcctgcagaccgtttggaacaagccaacagtgaaatcccttccctgc | |
| | gacatatgcaaagacgttgtcaccgcagctggtgatatgctgaagga | |
| | caatgccactgaggaggagatccttgtttacttggagaagacctgtg | |
| | actggcttccgaaaccgaacatgtctgcttcatgcaaggagatagtg | |
| | gactcctacctccctgtcatcctggacatcattaaaggagaaatgag | |
| | ccgtcctggggaggtgtgctctgctctcaacctctgcgagtctctcc | |
| | agaagcacctagcagagctgaatcaccagaagcagctggagtccaat | |
| | aagatcccagagctggacatgactgaggtggtggcccccttcatggc | |
| | caacatccctctcctcctctaccctcaggacggcccccgcagcaagc | |
| | cccagccaaaggataatggggacgtttgccaggactgcattcagatg | |
| | gtgactgacatccagactgctgtacggaccaactccacctttgtcca | |
| | ggccttggtggaacatgtcaaggaggagtgtgaccgcctgggccctg | |
| | gcatggccgacatatgcaagaactatatcagccagtattctgaaatt | |
| | gctatccagatgatgatgcacatgcaacccaaggagatctgtgcgct | |
| | ggttgggttctgtgatgaggtgaaagagatgcccatgcagactctgg | |
| | tccccgccaaagtggcctccaagaatgtcatccctgccctggaactg | |
| | gtggagcccattaagaagcacgaggtcccagcaaagtctgatgttta | |
| | ctgtgaggtgtgtgaattcctggtgaaggaggtgaccaagctgattg | |
| | acaacaacaagactgagaaagaaatactcgacgcttttgacaaaatg | |
| | tgctcgaagctgccgaagtccctgtcggaagagtgccaggaggtggt | |
| | ggacacgtacggcagctccatcctgtccatcctgctggaggaggtca | |
| | gccctgagctggtgtgcagcatgctgcacctctgctctggcacgcgg | |
| | ctgcctgcactgaccgttcacgtgactcagccaaaggacggtggctt | |
| | ctgcgaagtgtgcaagaagctggtgggttatttggatcgcaacctgg | |
| | agaaaaacagcaccaagcaggagatcctggctgctcttgagaaaggc | |
| | tgcagcttcctgccagacccttaccagaagcagtgtgatcagtttgt | |
| | ggcagagtacgagcccgtgctgatcgagatcctggtggaggtgatgg | |
| | atccttccttcgtgtgcttgaaaattggagcctgcccctcggcccat | |
| | aagcccttgttgggaactgagaagtgtatatggggcccaagctactg | |
| | gtgccagaacacagagacagcagcccagtgcaatgctgtcgagcatt | |
| | gcaaacgccatgtgtggaactag | |
| PSAP | MYALFLLASLLGAALAGPVLGLKECTRGSAVWCQNVKTASDCGAVKH | 1750 |
| (signal | CLQTVWNKPTVKSLPCDICKDVVTAAGDMLKDNATEEEILVYLEKTC | |
| sequence | DWLPKPNMSASCKEIVDSYLPVILDIIKGEMSRPGEVCSALNLCESL | |
| underlined)-aa | QKHLAELNHQKQLESNKIPELDMTEVVAPFMANIPLLLYPQDGPRSK | |
| | PQPKDNGDVCQDCIQMVTDIQTAVRTNSTFVQALVEHVKEECDRLGP | |
| | GMADICKNYISQYSEIAIQMMMHMQPKEICALVGFCDEVKEMPMQTL | |
| | VPAKVASKNVIPALELVEPIKKHEVPAKSDVYCEVCEFLVKEVTKLI | |
| | DNNKTEKEILDAFDKMCSKLPKSLSEECQEVVDTYGSSILSILLEEV | |
| | SPELVCSMLHLCSGTRLPALTVHVTQPKDGGFCEVCKKLVGYLDRNL | |
| | EKNSTKQEILAALEKGCSFLPDPYQKQCDQFVAEYEPVLIEILVEVM | |
| | DPSFVCLKIGACPSAHKPLLGTEKCIWGPSYWCQNTETAAQCNAVEH | |
| | CKRHVWN | |
| PSAP | GPVLGLKECTRGSAVWCQNVKTASDCGAVKHCLQTVWNKPTVKSLPC | 1785 |
| (no signal | DICKDVVTAAGDMLKDNATEEEILVYLEKTCDWLPKPNMSASCKEIV | |
| sequence) | DSYLPVILDIIKGEMSRPGEVCSALNLCESLQKHLAELNHQKQLESN | |
| | KIPELDMTEVVAPFMANIPLLLYPQDGPRSKPQPKDNGDVCQDCIQM | |
| | VTDIQTAVRTNSTFVQALVEHVKEECDRLGPGMADICKNYISQYSEI | |
| | AIQMMMHMQPKEICALVGFCDEVKEMPMQTLVPAKVASKNVIPALEL | |
| | VEPIKKHEVPAKSDVYCEVCEFLVKEVTKLIDNNKTEKEILDAFDKM | |
| | CSKLPKSLSEECQEVVDTYGSSILSILLEEVSPELVCSMLHLCSGTR | |
| | LPALTVHVTQPKDGGFCEVCKKLVGYLDRNLEKNSTKQEILAALEKG | |
| | CSFLPDPYQKQCDQFVAEYEPVLIEILVEVMDPSFVCLKIGACPSAH | |
| | KPLLGTEKCIWGPSYWCQNTETAAQCNAVEHCKRHVWN | |
| SAPC | atgtacgccctcttcctcctggccagcctcctgggcgcggctctagc | 1786 |
| (signal | cgtgaaagagatgcccatgcagactctggtccccgccaaagtggcct | |
| sequence | ccaagaatgtcatccctgccctggaactggtggagcccattaagaag | |
| underlined)-nt | cacgaggtcccagcaaagtctgatgtttactgtgaggtgtgtgaatt | |
| | cctggtgaaggaggtgaccaagctgattgacaacaacaagactgaga | |
| | aagaaatactcgacgcttttgacaaaatgtgctcgaagctgccgaag | |
| | tccctgtcggaagagtgccaggaggtggtggacacgtacggcagctc | |
| | catcctgtccatcctgctggaggaggtcagccctgagctggtgtgca | |
| | gcatgctgcacctctgctctggc | |
| SAPC | gtgaaagagatgcccatgcagactctggtccccgccaaagtggcctc | 1787 |
| (no signal | caagaatgtcatccctgccctggaactggtggagcccattaagaagc | |
| sequence)-nt | acgaggtcccagcaaagtctgatgtttactgtgaggtgtgtgaattc | |
| | ctggtgaaggaggtgaccaagctgattgacaacaacaagactgagaa | |
| | agaaatactcgacgcttttgacaaaatgtgctcgaagctgccgaagt | |
| | ccctgtcggaagagtgccaggaggtggtggacacgtacggcagctcc | |
| | atcctgtccatcctgctggaggaggtcagccctgagctggtgtgcag | |
| | catgctgcacctctgctctggc | |
| SAPC | MYALFLLASLLGAALAVKEMPMQTLVPAKVASKNVIPALELVEPIKK | 1788 |
| (signal | HEVPAKSDVYCEVCEFLVKEVTKLIDNNKTEKEILDAFDKMCSKLPK | |
| sequence | SLSEECQEVVDTYGSSILSILLEEVSPELVCSMLHLCSG | |
| underlined)-aa | | |
| SAPC | VKEMPMQTLVPAKVASKNVIPALELVEPIKKHEVPAKSDVYCEVCEF | 1789 |
| (no signal | LVKEVTKLIDNNKTEKEILDAFDKMCSKLPKSLSEECQEVVDTYGSS | |
| sequence)-aa | ILSILLEEVSPELVCSMLHLCSG | |
| SAPCv2 | atgtacgccctcttcctcctggccagcctcctgggcgcggctctagc | 1790 |
| (signal | ctctgatgtttactgtgaggtgtgtgaattcctggtgaaggaggtga | |
| sequence | ccaagctgattgacaacaacaagactgagaaagaaatactcgacgct | |
| underlined)-nt | tttgacaaaatgtgctcgaagctgccgaagtccctgtcggaagagtg | |
| | ccaggaggtggtggacacgtacggcagctccatcctgtccatcctgc | |
| | tggaggaggtcagccctgagctggtgtgcagcatgctgcacctctgc | |
| | tctggc | |
| SAPCv2 | tctgatgtttactgtgaggtgtgtgaattcctggtgaaggaggtgac | 1791 |
| (no signal | caagctgattgacaacaacaagactgagaaagaaatactcgacgctt | |
| sequence)-nt | ttgacaaaatgtgctcgaagctgccgaagtccctgtcggaagagtgc | |
| | caggaggtggtggacacgtacggcagctccatcctgtccatcctgct | |
| | ggaggaggtcagccctgagctggtgtgcagcatgctgcacctctgct | |
| | ctggc | |
| SAPCv2 | MYALFLLASLLGAALASDVYCEVCEFLVKEVTKLIDNNKTEKEILDA | 1792 |
| (signal | FDKMCSKLPKSLSEECQEVVDTYGSSILSILLEEVSPELVCSMLHLC | |
| sequence | SG | |
| underlined)-aa | | |
| SAPCv2 | SDVYCEVCEFLVKEVTKLIDNNKTEKEILDAFDKMCSKLPKSLSEEC | 1758 |
| (no signal | QEVVDTYGSSILSILLEEVSPELVCSMLHLCSG | |
| sequence)-aa | | |
| Cell | | |
| Penetrating | | |
| Peptides | | |
| TAT - nt | tatggcaggaaaaagcggaggcaaaggcgccgccccccccag | 1793 |
| TAT - aa | YGRKKRRQRRRPPQ | 1794 |
| ApoB - nt | tccgtaatcgacgccttacagtataagctggagggaaccaccagatt | 1795 |
| | gacaaggaaacgagggcttaagcttgctactgcactatccctgagca | |
| | ataaattt | |
| ApoB - aa | SVIDALQYKLEGTTRLTRKRGLKLATALSLSNKF | 1796 |
| ApoEII - nt | ctacggaagctgcggaagcggctactgctgcggaaacttcggaaacg | 1797 |
| | gctactg | |
| ApoEII - aa | LRKLRKRLLLRKLRKRLL | 1798 |
| Lysosomal | | |
| Targeting | | |
| Sequence (LTS) | | |
| LTS1 - nt | aagtttgaaagacag | 1799 |
| LTS1 - aa | KFERQ | 1800 |
| LTS2 - nt | atgaaggagaccgctgctgcaaagttcgagagacagcatatggatag | 1801 |
| | ctccacaagcgccgca | |
| LTS2 - aa | MKETAAAKFERQHMDSSTSAA | 1802 |
| LTS3 - nt | cagaaaatcctggat | 1803 |
| LTS3 - aa | QKILD | 1804 |
| LTS4 - nt | cagagattcttcgag | 1805 |
| LTS4 - aa | QRFFE | 1806 |
| LTS5 - nt | aagtttgaaagacagcagaaaatcctggatcagagattcttcgag | 1807 |
| LTS5 - aa | KFERQQKILDQRFFE | 1808 |

[0653] In some embodiments, the viral genome comprises a payload region encoding a SapC protein. The encoded SapC may be derived from any species, such as, but not limited to human, non-human primate, or rodent. SapC protein is thought to coordinate GCase activity of GBA by locally altering lipid membranes, exposing glucosylceramide molecules for hydrolysis (see Alattia, Jean-Rene, et al. “Molecular imaging of membrane interfaces reveals mode of β-glucosidase activation by saposin C.” Proceedings of the National Academy of Sciences 104.44 (2007): 17394-17399, the contents of which are incorporated by reference herein in their entirety).

[0654] In some embodiments, the viral genome comprises a payload region encoding a human (Homo sapiens) SapC, or a variant thereof.

[0655] Various embodiments of the disclosure herein provide an adeno-associated viral (AAV) particle comprising a viral genome, the viral genome comprising at least one inverted terminal repeat region and a nucleic acid sequence encoding a polypeptide having at least 90% sequence identity to a human SapC (hSapC) sequence, or a fragment thereof, as provided in Table 4. In some embodiments, the AAV viral genome comprises at least one inverted terminal repeat region and a nucleic acid sequence encoding a polypeptide having at least 95% sequence identity to a Saposin sequence, or a fragment thereof, as provided in Table 4. In some embodiments, the AAV viral genome comprises at least one inverted terminal repeat region and a nucleic acid sequence encoding a polypeptide having at least 98% sequence identity to a Saposin sequence, or a fragment thereof, as provided in Table 4. In some embodiments, the AAV viral genome comprises at least one inverted terminal repeat region and a nucleic acid sequence encoding a polypeptide having at least 99% sequence identity to a Saposin sequence, or a fragment thereof, as provided in Table 4. In some embodiments, the AAV viral genome comprises at least one inverted terminal repeat region and a nucleic acid sequence encoding a Saposin sequence, or a fragment thereof, as provided in Table 4.

[0656] In some embodiments, the Saposin polypeptide is derived from a Saposin or PSAP sequence of a non-human primate, such as the cynomolgus monkey, Macaca fascicularis (cynoPSAP or cPSAP). Certain embodiments provide the Saposin polypeptide as a humanized version of a Macaca fascicularis (HcynoSap) sequence.

[0657] In some embodiments, the viral genome comprises a payload region encoding a cynomolgus or crab-eating (long-tailed) macaque (Macaca fascicularis) PSAP or Saposin, or a variant thereof.

[0658] In some embodiments, the viral genome comprises a payload region encoding a rhesus macaque (Macaca mulatta) PSAP or Saposin, or a variant thereof.

[0659] In some embodiments, the viral genome comprises a payload region encoding a murine (Mus musculus) PSAP or Saposin, or variant thereof.

[0660] In some embodiments, the PSAP or Saposin polypeptide may comprise an amino acid sequence with 50%, 51%, 52%, 53%, 54%, 55%, 56%, 57%, 58%, 59%, 60%, 61%, 62%, 63%, 64%, 65%, 66%, 67%, 68%, 69%, 70%, 71%, 72%, 73%, 74%, 75%, 76%, 77%, 78%, 79%, 80%, 81%, 82%, 83%, 84%, 85%, 86%, 87%, 88%, 89%, 90%, 91%, 92%, 93%, 94%, 95%, 96%, 97%, 98%, 99%, or 100% identity to any of the those described above and provided in Table 4.

[0661] In some embodiments, the PSAP or Saposin polypeptide may be encoded by a nucleic acid sequence with 50%, 51%, 52%, 53%, 54%, 55%, 56%, 57%, 58%, 59%, 60%, 61%, 62%, 63%, 64%, 65%, 66%, 67%, 68%, 69%, 70%, 71%, 72%, 73%, 74%, 75%, 76%, 77%, 78%, 79%, 80%, 81%, 82%, 83%, 84%, 85%, 86%, 87%, 88%, 89%, 90%, 91%, 92%, 93%, 94%, 95%, 96%, 97%, 98%, 99%, or 100% identity to any of the those described above and provided in Table 4.

[0662] In some embodiments, the viral genome comprises a payload region further encoding a PD-associated gene the lack of expression of which causes or leads to or promotes the development of PD. Such PD-associated gene incudes GCase/GBA1, GBA2, prosapsin, LIMP2/SCARB2 (e.g., the gene product of SCARB2 gene), progranulin, GALC, CTSB, SMPD1, GCH1, RAB7, VPS35, IL-34, TREM2, TMEM106B, a combination of any of the foregoing, or a functional fragment thereof.

[0663] Thus in some embodiments, the viral genome comprises a payload region encoding a LIMP2/SCARB2, a membrane protein that regulates lysosomal and endosomal transport within a cell. In some embodiments, the SCARB2 gene encodes a peptide that is represented by NCBI Reference Sequence NP_005497.1 (incorporated herein by reference). In some embodiments the isolated nucleic acid comprises a SCARB2-encoding sequence that has been codon optimized.

[0664] In some embodiments, the viral genome comprises a payload region encoding a GBA2 protein (e.g., the gene product of GBA2 gene). In some embodiments, the GBA2-encoding sequence has been codon optimized (e.g., codon optimized for expression in mammalian cells, for example human cells). In some embodiments, the GBA2-encoding sequence encodes a protein comprising an amino acid sequence as set forth in NCBI Reference Sequence NP_065995.1 (incorporated herein by reference).

[0665] In some embodiments, the viral genome comprises a payload region encoding a GALC protein (e.g., the gene product of GALC gene). In some embodiments, the GALC-encoding sequence has been codon optimized (e.g., codon optimized for expression in mammalian cells, for example human cells). In some embodiments, the GALC-encoding sequence encodes a protein comprising an amino acid sequence as set forth in NCBI Reference Sequence NP_000144.2 (incorporated herein by reference).

[0666] In some embodiments, the viral genome comprises a payload region encoding a CTSB protein (e.g., the gene product of CTSB gene). In some embodiments, the CTSB-encoding sequence has been codon optimized (e.g., codon optimized for expression in mammalian cells, for example human cells). In some embodiments, the CTSB-encoding sequence encodes a protein comprising an amino acid sequence as set forth in NCBI Reference Sequence NP_001899.1 (incorporated by reference).

[0667] In some embodiments, the viral genome comprises a payload region encoding a SMPD1 protein (e.g., the gene product of SMPD1 gene). In some embodiments, the SMPD1-encoding sequence has been codon optimized (e.g., codon optimized for expression in mammalian cells, for example human cells). In some embodiments, the SMPD1-encoding sequence encodes a protein comprising an amino acid sequence as set forth in NCBI Reference Sequence NP_000534.3 (incorporated herein by reference).

[0668] In some embodiments, the viral genome comprises a payload region encoding a GCH1 protein (e.g., the gene product of GCH1 gene). In some embodiments, the GCH1-encoding sequence has been codon optimized (e.g., codon optimized for expression in mammalian cells, for example human cells). In some embodiments, the GCH1-encoding sequence encodes a protein comprising an amino acid sequence as set forth in NCBI Reference Sequence NP_000534.3 (incorporated by reference).

[0669] In some embodiments, the viral genome comprises a payload region encoding a RAB7L protein (e.g., the gene product of RAB7L gene). In some embodiments, the RAB7L-encoding sequence has been codon optimized (e.g., codon optimized for expression in mammalian cells, for example human cells). In some embodiments, the RAB7L encodes a protein comprising an amino acid sequence as set forth in NCBI Reference Sequence NP_003920.1 (incorporated by reference).

[0670] In some embodiments, the viral genome comprises a payload region encoding a VPS35 protein (e.g., the gene product of VPS35 gene). In some embodiments, the VPS35-encoding sequence has been codon optimized (e.g., codon optimized for expression in mammalian cells, for example human cells). In some embodiments, the VPS35 encodes a protein comprising an amino acid sequence as set forth in NCBI Reference Sequence NP_060676.2 (incorporated by reference).

[0671] In some embodiments, the viral genome comprises a payload region encoding an IL-34 protein (e.g., the gene product of IL34 gene). In some embodiments, the IL-34-encoding sequence has been codon optimized (e.g., codon optimized for expression in mammalian cells, for example human cells). In some embodiments, the IL-34-encoding sequence encodes a protein comprising an amino acid sequence as set forth in NCBI Reference Sequence NP_689669.2 (incorporated by reference).

[0672] In some embodiments, the viral genome comprises a payload region encoding a TREM2 protein (e.g., the gene product of TREM gene). In some embodiments, the TREM2-encoding sequence has been codon optimized (e.g., codon optimized for expression in mammalian cells, for example human cells). In some embodiments, the TREM2-encoding sequence encodes a protein comprising an amino acid sequence as set forth in NCBI Reference Sequence NP_061838.1 (incorporated by reference).

[0673] In some embodiments, the viral genome comprises a payload region encoding a TMEM106B protein (e.g., the gene product of TMEM106B gene). In some embodiments, the TMEM106B-encoding sequence has been codon optimized (e.g., codon optimized for expression in mammalian cells, for example human cells). In some embodiments, the TMEM106B-encoding sequence encodes a protein comprising an amino acid sequence as set forth in NCBI Reference Sequence NP_060844.2 (incorporated by reference).

[0674] In some embodiments, the viral genome comprises a payload region encoding a progranulin (e.g., the gene product of PGRN gene). In some embodiments, the progranulin-encoding sequence has been codon optimized (e.g., codon optimized for expression in mammalian cells, for example human cells). In some embodiments, the nucleic acid sequence encoding the progranulin (PRGN) encodes a protein comprising an amino acid sequence as set forth in NCBI Reference Sequence NP_002078.1 (incorporated by reference).

[0675] In certain embodiments, a functional fragment of any of the above protein such as GCase/GBA, GBA2, LIMP2/SCARB2, progranulin, GALC, CTSB, SMPD1, GCH1, RAB7, VPS35, IL-34, TREM2, TMEM106B, and prosapsin (such as SapA-SapD) may comprise about 50%, about 60%, about 70%, about 80% about 90% or about 99% of a protein encoded by the respective wt genes or gene segments (such as coding sequence for SapA-SapD). In some embodiments, a functional fragment of a wt sequence comprises between 50% and 99.9% (e.g., any value between 50% and 99.9%) of a protein encoded by a wt sequence.

### Exemplary GCase/SapC Payloads

[0676] In some embodiments, the viral genome comprises a payload region encoding a GCase protein and a SapC protein (a GCase/SapC polypeptide). The encoded GCase/SapC polypeptide may be derived from GCase and SapC protein sequences of any species, such as, but not limited to human, non-human primate, or rodent.

[0677] Various embodiments of the disclosure herein provide an adeno-associated viral (AAV) particle comprising a viral genome, the viral genome comprising at least one inverted terminal repeat region and a nucleic acid sequence encoding a GCase/SapC polypeptide having a region of at least 90% sequence identity to a human GCase sequence provided in Table 3 or a fragment or variant thereof and a region of at least 90% sequence identity to a human SapC sequence provided in Table 4 or 16, or a fragment or variant thereof.

[0678] In some embodiments, the GCase/SapC polypeptide may comprise a GCase region having 50%, 51%, 52%, 53%, 54%, 55%, 56%, 57%, 58%, 59%, 60%, 61%, 62%, 63%, 64%, 65%, 66%, 67%, 68%, 69%, 70%, 71%, 72%, 73%, 74%, 75%, 76%, 77%, 78%, 79%, 80%, 81%, 82%, 83%, 84%, 85%, 86%, 87%, 88%, 89%, 90%, 91%, 92%, 93%, 94%, 95%, 96%, 97%, 98%, 99%, or 100% sequence identity to any of the those in Table 3 or 15.

[0679] In some embodiments, the GCase/SapC polypeptide may comprise a SapC region having 50%, 51%, 52%, 53%, 54%, 55%, 56%, 57%, 58%, 59%, 60%, 61%, 62%, 63%, 64%, 65%, 66%, 67%, 68%, 69%, 70%, 71%, 72%, 73%, 74%, 75%, 76%, 77%, 78%, 79%, 80%, 81%, 82%, 83%, 84%, 85%, 86%, 87%, 88%, 89%, 90%, 91%, 92%, 93%, 94%, 95%, 96%, 97%, 98%, 99%, or 100% sequence identity to any of the those in Table 4 or 16.

[0680] In some embodiments, the GCase/SapC polypeptide may be encoded by a nucleic acid sequence having a GCase region with 50%, 51%, 52%, 53%, 54%, 55%, 56%, 57%, 58%, 59%, 60%, 61%, 62%, 63%, 64%, 65%, 66%, 67%, 68%, 69%, 70%, 71%, 72%, 73%, 74%, 75%, 76%, 77%, 78%, 79%, 80%, 81%, 82%, 83%, 84%, 85%, 86%, 87%, 88%, 89%, 90%, 91%, 92%, 93%, 94%, 95%, 96%, 97%, 98%, 99%, or 100% sequence identity to any of the those described in Table 3 or 15.

[0681] In some embodiments, the GCase/SapC polypeptide may be encoded by a nucleic acid sequence having a SapC region with 50%, 51%, 52%, 53%, 54%, 55%, 56%, 57%, 58%, 59%, 60%, 61%, 62%, 63%, 64%, 65%, 66%, 67%, 68%, 69%, 70%, 71%, 72%, 73%, 74%, 75%, 76%, 77%, 78%, 79%, 80%, 81%, 82%, 83%, 84%, 85%, 86%, 87%, 88%, 89%, 90%, 91%, 92%, 93%, 94%, 95%, 96%, 97%, 98%, 99%, or 100% sequence identity to any of the those described in Table 4 or 16.

[0682] Viral genomes may be engineered with one or more spacer or linker regions to separate coding or non-coding regions. In some embodiments, the payload region of the AAV particle may optionally encode one or more linker sequences. In some cases, the linker may be a peptide linker that may be used to connect the polypeptides encoded by the payload region (i.e., GCase polypeptides and SapC polypeptides). Some peptide linkers may be cleaved after expression to separate GCase and SapC polypeptides, allowing expression of separate functional polypeptides. Linker cleavage may be enzymatic. In some cases, linkers comprise an enzymatic cleavage site to facilitate intracellular or extracellular cleavage. Some payload regions encode linkers that interrupt polypeptide synthesis during translation of the linker sequence from an mRNA transcript. Such linkers may facilitate the translation of separate protein domains (e.g., GCase and SapC domains) from a single transcript. In some cases, two or more linkers are encoded by a payload region of the viral genome. Non-limiting examples of linkers that may be encoded by the payload region of an AAV particle viral genome are given in Table 2.

[0683] In some embodiments, GCase and SapC polypeptides are delivered separately in independent AAV vectors.

[0684] In certain embodiments, viral genomes for expressing Gcase and/or Saposin may comprise a sequence as described in Table 5.

[0685] In some embodiments, the AAV viral genomes described herein comprise an enhancement elements such as a lysosomal targeting peptide sequence (LTS), a cell penetrating peptide (CPP), or both. For example, in some embodiments, a payload may have a sequence encoding a lysosomal targeting peptide. The sequence encoding the lysosomal targeting peptide can be a sequence derived from GCase. In some cases, it is a LIMP-2 binding domain, or a variant thereof, which aides in the intracellular trafficking of a molecule to lysosomes, which is responsible for the intracellular trafficking of GCase to lysosomes via LIMP-2 (Liou, Benjamin, et al. Journal of Biological Chemistry 289.43 (2014): 30063-30074, the contents of which are incorporated herein by reference in their entirety).

### Exemplary GBA AAV Viral Genome Sequence Regions and ITR to ITR Sequences

[0686] In some embodiments, a viral genome, e.g., an AAV viral genome or vector genome, described herein, comprises a promoter operably linked to a transgene encoding a GBA protein. In some embodiments, the viral genome further comprises an inverted terminal repeat region, an enhancer, an intron, a miR binding site, a polyA region, or a combination thereof. Exemplary sequence regions within ITR to ITR sequences for viral genomes according to the description are provided in Table 5.

TABLE 5
Exemplary Viral Genome sequence regions in ITR to ITR constructs

| | | SEQ |
|---|---|---|
| | | ID |
| Description | Sequence | NO: |
| ITR (130nt) | ctgcgcgctcgctcgctcactgaggccgcccgggcaaagcccgggcgtcgggcg | 1829 |
| | acctttggtcgcccggcctcagtgagcgagcgagcgcgcagagagggagtggcc | |
| | aactccatcactaggggttcct | |
| ITR(130nt) | aggaacccctagtgatggagttggccactccctctctgcgcgctcgctcgctca | 1830 |
| | ctgaggccgggcgaccaaaggtcgcccgacgcccgggctttgcccgggcggcct | |
| | cagtgagcgagcgagcgcgcag | |
| ITR variant A | TATTAGATCTGATGGCCGC | 1860 |
| ITR variant B | CTCCATCACTAGGGGTTCCT | 1861 |
| ITR variant B | AGGAACCCCTAGTGATGGAGTTGGCCACTCCCTCTCTGCGCGCTCGCTCGCTCA | 1862 |
| | CTGAGGCCGGGCGACCAAAGGTCGCCCGACGCCCGGGCTTTGCCCGGGCGGCCT | |
| | CAGTGAGCGAGCGAGCGCGCAGAGAGGGAGTGGCCAA | |
| ITR variant C | TATTAGATCTGATGGCCGCG | 1863 |
| ITR variant D | TCCATCACTAGGGGTTCCTG | 1864 |
| CMVie | GACATTGATTATTGACTAGTTATTAATAGTAATCAATTACGGGGTCATTAGTTC | 1831 |
| enhancer | ATAGCCCATATATGGAGTTCCGCGTTACATAACTTACGGTAAATGGCCCGCCTG | |
| | GCTGACCGCCCAACGACCCCCGCCCATTGACGTCAATAATGACGTATGTTCCCA | |
| | TAGTAACGCCAATAGGGACTTTCCATTGACGTCAATGGGTGGAGTATTTACGGT | |
| | AAACTGCCCACTTGGCAGTACATCAAGTGTATCATATGCCAAGTACGCCCCCTA | |
| | TTGACGTCAATGACGGTAAATGGCCCGCCTGGCATTATGCCCAGTACATGACCT | |
| | TATGGGACTTTCCTACTTGGCAGTACATCTACGTATTAGTCATCGCTATTACCA | |
| | TG | |
| CMV | gtgatgcggttttggcagtacatcaatgggcgtggatagcggtttgactcacgg | 1832 |
| promoter | ggatttccaagtctccaccccattgacgtcaatgggagtttgttttggcaccaa | |
| | aatcaacgggactttccaaaatgtcgtaacaactccgccccattgacgcaaatg | |
| | ggcggtaggcgtgtacggtgggaggtctatataagcagagctc | |
| CMV | gacattgattattgactagttattaatagtaatcaattacggggtcattagttc | 1833 |
| promoter | atagcccatatatggagttccgcgttacataacttacggtaaatggcccgcctg | |
| region (CMV | gctgaccgcccaacgacccccgcccattgacgtcaataatgacgtatgttccca | |
| enhancer and | tagtaacgccaatagggactttccattgacgtcaatgggtggagtatttacggt | |
| promoter) | aaactgcccacttggcagtacatcaagtgtatcatatgccaagtacgcccccta | |
| | ttgacgtcaatgacggtaaatggcccgcctggcattatgcccagtacatgacct | |
| | tatgggactttcctacttggcagtacatctacgtattagtcatcgctattacca | |
| | tggtgatgcggttttggcagtacatcaatgggcgtggatagcggtttgactcac | |
| | ggggatttccaagtctccaccccattgacgtcaatgggagtttgttttggcacc | |
| | aaaatcaacgggactttccaaaatgtcgtaacaactccgccccattgacgcaaa | |
| | tgggcggtaggcgtgtacggtgggaggtctatataagcagagctc | |
| CB promoter | ccacgttctgcttcactctccccatctcccccccctccccacccccaattttgt | 1834 |
| | atttatttattttttaattattttgtgcagcgatgggggcggggggggggggcg | |
| | cgcgccaggcggggcggggcggggcgaggggcggggcggggcgaggcggagagg | |
| | tgcggcggcagccaatcagagcggcgcgctccgaaagtttccttttatggcgag | |
| | gcggcggcggcggcggccctataaaaagcgaagcgcgcggcggg | |
| CAG promoter | ctagttattaatagtaatcaattacggggtcattagttcatagcccatatatgg | 1835 |
| | agttccgcgttacataacttacggtaaatggcccgcctggctgaccgcccaacg | |
| | acccccgcccattgacgtcaataatgacgtatgttcccatagtaacgccaatag | |
| | ggactttccattgacgtcaatgggtggagtatttacggtaaactgcccacttgg | |
| | cagtacatcaagtgtatcatatgccaagtacgccccctattgacgtcaatgacg | |
| | gtaaatggcccgcctggcattatgcccagtacatgaccttatgggactttccta | |
| | cttggcagtacatctacgtattagtcatcgctattaccatggtcgaggtgagcc | |
| | ccacgttctgcttcactctccccatctcccccccctccccacccccaattttgt | |
| | atttatttattttttaattattttgtgcagcgatgggggcgggggggggggggg | |
| | ggcgcgcgccaggcggggcggggcggggcgaggggcggggcggggcgaggcgga | |
| | gaggtgcggcggcagccaatcagagcggcgcgctccgaaagtttccttttatgg | |
| | cgaggcggcggcggcggcggccctataaaaagcgaagcgcgcggcgggcgGgag | |
| | tcgctgcgcgctgccttcgccccgtgccccgctccgccgccgcctcgcgccgcc | |
| | cgccccggctctgactgaccgcgttactcccacaggtgagcgggcgggacggcc | |
| | cttctcctccgggctgtaattagcgcttggtttaatgacggcttgtttcttttc | |
| | tgtggctgcgtgaaagccttgaggggctccgggagggccctttgtgcgggggga | |
| | gcggctcggggggtgcgtgcgtgtgtgtgtgcgtggggagcgccgcgtgcggct | |
| | ccgcgctgcccggcggctgtgagcgctgcgggcgcggcgcggggctttgtgcgc | |
| | tccgcagtgtgcgcgaggggagcgcggccgggggcggtgccccgcggtgcgggg | |
| | ggggctgcgaggggaacaaaggctgcgtgcggggtgtgtgcgtgggggggtgag | |
| | cagggggtgtgggcgcgtcggtcgggctgcaaccccccctgcacccccctcccc | |
| | gagttgctgagcacggcccggcttcgggtgcggggctccgtacggggcgtggcg | |
| | cggggctcgccgtgccgggcggggggtggcggcaggtgggggtgccgggcgggg | |
| | cggggccgcctcgggccggggagggctcgggggaggggcgcggcggcccccgga | |
| | gcgccggcggctgtcgaggcgcggcgagccgcagccattgccttttatggtaat | |
| | cgtgcgagagggcgcagggacttcctttgtcccaaatctgtgcggagccgaaat | |
| | ctgggaggcgccgccgcaccccctctagcgggcgcggggcgaagcggtgcggcg | |
| | ccggcaggaaggaaatgggcggggagggccttcgtgcgtcgccgcgccgccgtc | |
| | cccttctccctctccagcctcggggctgtccgcggggggacggctgccttcggg | |
| | ggggacggggcagggcggggttcggcttctggcgtgtgaccggcggctctagag | |
| | cctctgctaaccatgttcatgccttcttctttttcctacagctcctgggcaacg | |
| | tgctggttattgtgctgtctcatcattttggcaaagaattc | |
| CBA minimal | catggtcgaggtgagccccacgttctgcttcactctccccatctcccccccctc | 1836 |
| promoter | cccacccccaattttgtatttatttattttttaattattttgtgcagcgatggg | |
| | ggcggggggggggggggggcgcgcgccaggcggggcggggcggggcgaggggcg | |
| | gggcggggcgaggcggagaggtgcggcggcagccaatcagagcggcgcgctccg | |
| | aaagtttccttttatggcgaggcggcggcggcggcggccctataaaaagcgaag | |
| | cgcgcggcgggcg | |
| Intron 1 | Ggagtcgctgcgcgctgccttcgccccgtgccccgctccgccgccgcctcgcgc | 1837 |
| | cgcccgccccggctctgactgaccgcgttactcccacaggtgagcgggcgggac | |
| | ggcccttctcctccgggctgtaattagcgcttggtttaatgacggcttgtttct | |
| | tttctgtggctgcgtgaaagccttgaggggctccgggagggccctttgtgcggg | |
| | gggagcggctcggggggtgcgtgcgtgtgtgtgtgcgtggggagcgccgcgtgc | |
| | ggctccgcgctgcccggcggctgtgagcgctgcgggcgcggcgcggggctttgt | |
| | gcgctccgcagtgtgcgcgaggggagcgcggccgggggcggtgccccgcggtgc | |
| | ggggggggctgcgaggggaacaaaggctgcgtgcggggtgtgtgcgtggggggg | |
| | tgagcagggggtgtgggcgcgtcggtcgggctgcaaccccccctgcacccccct | |
| | ccccgagttgctgagcacggcccggcttcgggtgcggggctccgtacggggcgt | |
| | ggcgcggggctcgccgtgccgggcggggggtggcggcaggtgggggtgccgggc | |
| | ggggcggggccgcctcgggccggggagggctcgggggaggggcgcggcggcccc | |
| | cggagcgccggcggctgtcgaggcgcggcgagccgcagccattgccttttatgg | |
| | taatcgtgcgagagggcgcagggacttcctttgtcccaaatctgtgcggagccg | |
| | aaatctgggaggcgccgccgcaccccctctagcgggcgcggggcgaagcggtgc | |
| | ggcgccggcaggaaggaaatgggcggggagggccttcgtgcgtcgccgcgccgc | |
| | cgtccccttctccctctccagcctcggggctgtccgcggggggacggctgcctt | |
| | cgggggggacggggcagggcggggttcggcttctggcgtgtgaccggcggctct | |
| | agagcctctgctaaccatgttcatgccttcttctttttcctaca | |
| EF-1α | gcatgcgtga | 1838 |
| promoter | | |
| variant 1 | | |
| EF-1α | gcatgcgtgaggctccggtgcccgtcagtgggcagagcgcacatcgcccacagt | 1839 |
| promoter | ccccgagaagttggggggaggggtcggcaattgaaccggtgcctagagaaggtg | |
| variant 2 | gcgcggggtaaactgggaaagtgatgtcgtgtactggctccgcctttttcccga | |
| (intron | gggtgggggagaaccgtatataagtgcagtagtcgccgtgaacgttctttttcg | |
| underlined) | caacgggtttgccgccagaacacaggtaagtgccgtgtgtggttcccgcgggcc | |
| | tggcctctttacgggttatggcccttgcgtgccttgaattacttccacctggct | |
| | gcagtacgtgattcttgatcccgagcttcgggttggaagtgggtgggagagttc | |
| | gaggccttgcgcttaaggagccccttcgcctcgtgcttgagttgaggcctggcc | |
| | tgggcgctggggccgccgcgtgcgaatctggtggcaccttcgcgcctgtctcgc | |
| | tgctttcgataagtctctagccatttaaaatttttgatgacctgctgcgacgct | |
| | ttttttctggcaagatagtcttgtaaatgcgggccaagatctgcacactggtat | |
| | ttcggtttttggggccgcgggcggcgacggggcccgtgcgtcccagcgcacatg | |
| | ttcggcgaggcggggcctgcgagcgcggccaccgagaatcggacgggggtagtc | |
| | tcaagctggccggcctgctctggtgcctggcctcgcgccgccgtgtatcgcccc | |
| | gccctgggcggcaaggctggcccggtcggcaccagttgcgtgagcggaaagatg | |
| | gccgcttcccggccctgctgcagggagctcaaaatggaggacgcggcgctcggg | |
| | agagcgggcgggtgagtcacccacacaaaggaaaagggcctttccgtcctcagc | |
| | cgtcgcttcatgtgactccacggagtaccgggcgccgtccaggcacctcgatta | |
| | gttctcgagcttttggagtacgtcgtctttaggttggggggaggggttttatgc | |
| | gatggagtttccccacactgagtgggtggagactgaagttaggccagcttggca | |
| | cttgatgtaattctccttggaatttgccctttttgagtttggatcttggttcat | |
| | tctcaagcctcagacagtggttcaaagtttttttcttccatttcaggtgtcgtg | |
| | a | |
| EF-1α | ggctccggtgcccgtcagtgggcagagcgcacatcgcccacagtccccgagaag | 1840 |
| promoter | ttggggggaggggtcggcaattgaaccggtgcctagagaaggtggcgcggggta | |
| variant 3 | aactgggaaagtgatgtcgtgtactggctccgcctttttcccgagggtggggga | |
| (intron | gaaccgtatataagtgcagtagtcgccgtgaacgttctttttcgcaacgggttt | |
| underlined) | gccgccagaacacaggtaagtgccgtgtgtggttcccgcgggcctggcctcttt | |
| | acgggttatggcccttgcgtgccttgaattacttccacctggctgcagtacgtg | |
| | attcttgatcccgagcttcgggttggaagtgggtgggagagttcgaggccttgc | |
| | gcttaaggagccccttcgcctcgtgcttgagttgaggcctggcctgggcgctgg | |
| | ggccgccgcgtgcgaatctggtggcaccttcgcgcctgtctcgctgctttcgat | |
| | aagtctctagccatttaaaatttttgatgacctgctgcgacgctttttttctgg | |
| | caagatagtcttgtaaatgcgggccaagatctgcacactggtatttcggttttt | |
| | ggggccgcgggcggcgacggggcccgtgcgtcccagcgcacatgttcggcgagg | |
| | cggggcctgcgagcgcggccaccgagaatcggacgggggtagtctcaagctggc | |
| | cggcctgctctggtgcctggcctcgcgccgccgtgtatcgccccgccctgggcg | |
| | gcaaggctggcccggtcggcaccagttgcgtgagcggaaagatggccgcttccc | |
| | ggccctgctgcagggagctcaaaatggaggacgcggcgctcgggagagcgggcg | |
| | ggtgagtcacccacacaaaggaaaagggcctttccgtcctcagccgtcgcttca | |
| | tgtgactccacggagtaccgggcgccgtccaggcacctcgattagttctcgagc | |
| | ttttggagtacgtcgtctttaggttggggggaggggttttatgcgatggagttt | |
| | ccccacactgagtgggtggagactgaagttaggccagcttggcacttgatgtaa | |
| | ttctccttggaatttgccctttttgagtttggatcttggttcattctcaagcct | |
| | cagacagtggttcaaagtttttttcttccatttcaggtgtcgtga | |
| EF-1α | gtaagtgccgtgtgtggttcccgcgggcctggcctctttacgggttatggccct | 1841 |
| intron A | tgcgtgccttgaattacttccacctggctgcagtacgtgattcttgatcccgag | |
| | cttcgggttggaagtgggtgggagagttcgaggccttgcgcttaaggagcccct | |
| | tcgcctcgtgcttgagttgaggcctggcctgggcgctggggccgccgcgtgcga | |
| | atctggtggcaccttcgcgcctgtctcgctgctttcgataagtctctagccatt | |
| | taaaatttttgatgacctgctgcgacgctttttttctggcaagatagtcttgta | |
| | aatgcgggccaagatctgcacactggtatttcggtttttggggccgcgggcggc | |
| | gacggggcccgtgcgtcccagcgcacatgttcggcgaggcggggcctgcgagcg | |
| | cggccaccgagaatcggacgggggtagtctcaagctggccggcctgctctggtg | |
| | cctggcctcgcgccgccgtgtatcgccccgccctgggcggcaaggctggcccgg | |
| | tcggcaccagttgcgtgagcggaaagatggccgcttcccggccctgctgcaggg | |
| | agctcaaaatggaggacgcggcgctcgggagagcgggcgggtgagtcacccaca | |
| | caaaggaaaagggcctttccgtcctcagccgtcgcttcatgtgactccacggag | |
| | taccgggcgccgtccaggcacctcgattagttctcgagcttttggagtacgtcg | |
| | tctttaggttggggggaggggttttatgcgatggagtttccccacactgagtgg | |
| | gtggagactgaagttaggccagcttggcacttgatgtaattctccttggaattt | |
| | gccctttttgagtttggatcttggttcattctcaagcctcagacagtggttcaa | |
| | agtttttttcttccatttcag | |
| Human beta | tcagatcgcctggagacgccatccacgctgttttgacctccatagaagacaccg | 1842 |
| globin | ggaccgatccagcctccgcggattcgaatcccggccgggaacggtgcattggaa | |
| intron | cgcggattccccgtgccaagagtgacgtaagtaccgcctatagagtctataggc | |
| (hGBint) | ccacaaaaaatgctttcttcttttaatatacttttttgtttatcttatttctaa | |
| | tactttccctaatctctttctttcagggcaataatgatacaatgtatcatgcct | |
| | ctttgcaccattctaaagaataacagtgataatttctgggttaaggcaatagca | |
| | atatttctgcatataaatatttctgcatataaattgtaactgatgtaagaggtt | |
| | tcatattgctaatagcagctacaatccagctaccattctgcttttattttatgg | |
| | ttgggataaggctggattattctgagtccaagctaggcccttttgctaatcatg | |
| | ttcatacctcttatcttcctcccacagctcctgggcaacgtgctggtctgtgtg | |
| | ctggcccatcactttggcaaagaatt | |
| Furin - nt | agaaagaggcga | 1724 |
| Furin - aa | RKRR | 1854 |
| T2A - nt | gagggcagaggaagtcttctaacatgcggtgacgtggaggagaatcccggccct | 1726 |
| T2A - nt | EGRGSLLTCGDVEENPGP | 1855 |
| (G4S) | tccggaggcggcggcagc | 1729 |
| Linker - nt | | |
| (G4S) | GGGGS | 1843 |
| Linker - aa | | |
| (G4S)3 | GGAGGGGGGGGTTCGGGTGGCGGCGGAAGTGGGGGCGGTGGTTCT | 1730 |
| Linker - nt | | |
| (G4S)3-aa | GGGGSGGGGSGGGGS | 1845 |
| polyA signal | gatctttttccctctgccaaaaattatggggacatcatgaagccccttgagcat | 1846 |
| sequence | ctgacttctggctaataaaggaaatttattttcattgcaatagtgtgttggaat | |
| | tttttgtgtctctcactcg | |
| miR183 | AGTGAATTCTACCAGTGCCATA | 1847 |
| binding site | | |
| Spacer | GATAGTTA | 1848 |
| miR183 | AGTGAATTCTACCAGTGCCATAGATAGTTAAGTGAATTCTACCAGTGCCATAGA | 1849 |
| binding site | TAGTTAAGTGAATTCTACCAGTGCCATAGATAGTTAAGTGAATTCTACCAGTGC | |
| series | CATA | |
| Signal | ATGGAATTCTCTAGCCCATCTAGAGAGGAATGTCCTAAGCCTCTGTCAAGAGTG | 1850 |
| Sequence - | TCCATCATGGCCGGCAGCCTGACAGGCCTGCTGCTGCTGCAGGCCGTGTCCTGG | |
| nt | GCCAGTGGA | |
| Signal | ATGGAGTTTTCAAGTCCTTCCAGAGAGGAATGTCCCAAGCCTTTGAGTAGGGTA | 1851 |
| Sequence - | AGCATCATGGCTGGCAGCCTCACAGGATTGCTTCTACTTCAGGCAGTGTCGTGG | |
| nt | GCATCAGGT | |
| Signal | atggaattcagcagccccagcagagaggaatgccccaagcctctgagccgggtg | 1852 |
| Sequence - | tcaatcatggccggatctctgacaggactgctgctgcttcaggccgtgtcttgg | |
| nt | gcttctggc | |
| Signal | MEFSSPSREECPKPLSRVSIMAGSLTGLLLLQAVSWASG | 1853 |
| Sequence - | | |
| aa | | |

[0687] In some embodiments, the viral genome comprises an inverted terminal repeat sequence region (ITR) provided in Table 5, or a nucleotide sequence with at least 70%, 75%, 80%, 85%, 90%, 95% or 99% sequence identity to any of the ITR sequences in Table 5.

[0688] This disclosure also provides in some embodiments, a GBA protein encoded by any one of SEQ ID NOs: 1759-1771 or 1809-1828, or a nucleotide sequence substantially identical (e.g., having at least about 70%, 75%, 80%, 85%, 90%, 92%, 95%, 97%, 98%, or 99% sequence identity) to any of the aforesaid sequences. In some embodiments, the viral genome comprises a promoter provided in Table 5 or a nucleotide sequence with at least 70%, 75%, 80%, 85%, 90%, 95% or 99% sequence identity to any of the promoter sequences in Table 5.

[0689] In some embodiments, the viral genome of an AAV particle described herein comprises the nucleotide sequence, e.g., the nucleotide sequence from the 5′ ITR to the 3′ ITR, of the nucleotide sequences of GBA_VG1 to GBA_VG34, e.g., as described in Tables 18-21 or 29-32, or a nucleotide sequence substantially identical (e.g., having at least about 70%, 75%, 80%, 85%, 90%, 92%, 95%, 97%, 98%, or 99% sequence identity) to any of the aforesaid sequences. In some embodiments, the viral genome of an AAV particle described herein comprises the nucleotide sequence, e.g., the nucleic acid sequence from the 5′ ITR to the 3′ ITR, of any of the nucleotide sequences in Table 18-21 or 29-32, or a nucleotide sequence substantially identical (e.g., having at least about 70%, 75%, 80%, 85%, 90%, 92%, 95%, 97%, 98%, or 99% sequence identity) to any of the aforesaid sequences. In some embodiments, the viral genome of an AAV particle described herein comprises the nucleotide sequence, e.g., the nucleic acid sequence from the 5′ ITR to the 3′ ITR, of any of the nucleotide sequences of SEQ ID NOs: 1759-1771, 1809-1828, or 1870, or a nucleotide sequence substantially identical (e.g., having at least about 70%, 75%, 80%, 85%, 90%, 92%, 95%, 97%, 98%, or 99% sequence identity) to any of the aforesaid sequences.

[0690] This disclosure also provides in some embodiments, a GBA protein (e.g., a GCase protein) encoded by any one of SEQ ID NOs: 1759-1771, 1809-1828, or 1870, or a nucleotide sequence substantially identical (e.g., having at least about 70%, 75%, 80%, 85%, 90%, 92%, 95%, 97%, 98%, or 99% sequence identity) to any of the aforesaid sequences.

[0691] In some embodiments, a viral genome encoding a GBA protein is a wtGBA viral genome, wherein the viral genome comprises a transgene encoding a GBA protein (optionally wherein the nucleotide sequence encoding the GBA protein is a codon optimized nucleotide sequence), but does not encode an enhancement element, e.g., an enhancement element described herein. In some embodiments, a viral genome encoding a GBA protein is an enGBA viral genome, wherein the viral genome comprises a transgene encoding a GBA protein (optionally wherein the nucleotide sequence encoding the GBA protein is a codon optimized nucleotide sequence), and further encodes an enhancement element, e.g., an enhancement element described herein.

TABLE 18
Exemplary Viral Genome (ITR to ITR) sequences

| Construct ID | Description (5′ to 3′) | SEQ ID NO: | Length |
|---|---|---|---|
| GBA_VG1 | ITR (SEQ ID NO: 1829); CMVie (SEQ ID NO: 1831); CB | 1759 | 3413 |
| | promoter (SEQ ID NO: 1834); human beta globin intron (hGBint) | | |
| | (SEQ ID NO: 1842); signal sequence (SEQ ID NO: 1852); GBA | | |
| | Variant 3 coding sequence (SEQ ID NO: 1781); polyA signal | | |
| | region (SEQ ID NO: 1846); ITR (SEQ ID NO: 1830) | | |
| GBA_VG2 | ITR (SEQ ID NO: 1829); CMVie (SEQ ID NO: 1831); CB | 1760 | 3428 |
| | promoter (SEQ ID NO: 1834); human beta globin intron (hGBint) | | |
| | (SEQ ID NO: 1842); signal sequence (SEQ ID NO: 1852); GBA | | |
| | Variant 3 coding sequence (SEQ ID NO: 1781); Lysosomal | | |
| | targeting sequence 1 (LTS1) (SEQ ID NO: 1799); polyA signal | | |
| | region (SEQ ID NO: 1846); ITR (SEQ ID NO: 1830) | | |
| GBA_VG3 | ITR (SEQ ID NO: 1829); CMVie (SEQ ID NO: 1831); CB | 1761 | 3476 |
| | promoter (SEQ ID NO: 1834); human beta globin intron (hGBint) | | |
| | (SEQ ID NO: 1842); signal sequence (SEQ ID NO: 1852); | | |
| | Lysosomal targeting sequence 2 (LTS2) (SEQ ID NO: 1801); | | |
| | GBA Variant 3 coding sequence (SEQ ID NO: 1781); polyA | | |
| | signal region (SEQ ID NO: 1846); ITR (SEQ ID NO: 1830) | | |
| GBA_VG4 | ITR (SEQ ID NO: 1829); CMVie (SEQ ID NO: 1831); CB | 1762 | 3428 |
| | promoter (SEQ ID NO: 1834); human beta globin intron (hGBint) | | |
| | (SEQ ID NO: 1842); signal sequence (SEQ ID NO: 1852); GBA | | |
| | Variant 3 coding sequence (SEQ ID NO: 1781); Lysosomal | | |
| | targeting sequence 3 (LTS3) (SEQ ID NO: 1803); polyA signal | | |
| | region (SEQ ID NO: 1846); ITR (SEQ ID NO: 1830) | | |
| GBA_VG5 | ITR (SEQ ID NO: 1829); CMVie (SEQ ID NO: 1831); CB | 1763 | 3428 |
| | promoter (SEQ ID NO: 1834); human beta globin intron (hGBint) | | |
| | (SEQ ID NO: 1842); signal sequence (SEQ ID NO: 1852); GBA | | |
| | Variant 3 coding sequence (SEQ ID NO: 1781); Lysosomal | | |
| | targeting sequence 4 (LTS4) (SEQ ID NO: 1805); polyA signal | | |
| | region (SEQ ID NO: 1846); ITR (SEQ ID NO: 1830) | | |
| GBA_VG6 | ITR (SEQ ID NO: 1829); CMVie (SEQ ID NO: 1831); CB | 1764 | 3512 |
| | promoter (SEQ ID NO: 1834); human beta globin intron (hGBint) | | |
| | (SEQ ID NO: 1842); signal sequence (SEQ ID NO: 1852); GBA | | |
| | Variant 3 coding sequence (SEQ ID NO: 1781); G4S3 linker | | |
| | coding sequence (SEQ ID NO: 1730); ApoEII coding sequence | | |
| | (SEQ ID NO: 1797); polyA signal region (SEQ ID NO: 1846); | | |
| | ITR (SEQ ID NO: 1830) | | |
| GBA_VG7 | ITR (SEQ ID NO: 1829); CMVie (SEQ ID NO: 1831); CB | 1765 | 3500 |
| | promoter (SEQ ID NO: 1834); human beta globin intron (hGBint) | | |
| | (SEQ ID NO: 1842); signal sequence (SEQ ID NO: 1852); GBA | | |
| | Variant 3 coding sequence (SEQ ID NO: 1781); G4S3 linker | | |
| | coding sequence (SEQ ID NO: 1730); TAT coding sequence (SEQ | | |
| | ID NO: 1793); polyA signal region (SEQ ID NO: 1846); ITR | | |
| | (SEQ ID NO: 1830) | | |
| GBA_VG8 | ITR (SEQ ID NO: 1829); CMVie (SEQ ID NO: 1831); CB | 1766 | 4463 |
| | promoter (SEQ ID NO: 1834); signal sequence (SEQ ID NO: | | |
| | 1852); GBA Variant 3 coding sequence (SEQ ID NO: 1781); Furin | | |
| | cleavage site coding sequence (SEQ ID NO: 1724); T2A coding | | |
| | sequence (SEQ ID NO: 1726); signal sequence (SEQ ID NO: | | |
| | 1856); Prosaposin (PSAP) coding sequence (SEQ ID NO: 1859); | | |
| | poly A signal region (SEQ ID NO: 1846); ITR (SEQ ID NO: 1830) | | |
| GBA_VG9 | ITR (SEQ ID NO: 1829); CMVie (SEQ ID NO: 1831); CB | 1767 | 3878 |
| | promoter (SEQ ID NO: 1834); human beta globin intron (hGBint) | | |
| | (SEQ ID NO: 1842); signal sequence (SEQ ID NO: 1852); GBA | | |
| | Variant 3 coding sequence (SEQ ID NO: 1781); Furin cleavage | | |
| | site coding sequence (SEQ ID NO: 1724); T2A coding sequence | | |
| | (SEQ ID NO: 1726); signal sequence (SEQ ID NO: 1856); SAPC | | |
| | coding sequence (SEQ ID NO: 1787); polyA signal region (SEQ | | |
| | ID NO: 1846); ITR (SEQ ID NO: 1830) | | |
| GBA_VG10 | ITR (SEQ ID NO: 1829); CMVie (SEQ ID NO: 1831); CB | 1768 | 3767 |
| | promoter (SEQ ID NO: 1834); human beta globin intron (hGBint) | | |
| | (SEQ ID NO: 1842); signal sequence (SEQ ID NO: 1852); GBA | | |
| | Variant 3 coding sequence (SEQ ID NO: 1781); Furin cleavage | | |
| | site coding sequence (SEQ ID NO: 1724); T2A coding sequence | | |
| | (SEQ ID NO: 1726); signal sequence (SEQ ID NO: 1856); | | |
| | SAPCv2 coding sequence (SEQ ID NO: 1791); polyA signal | | |
| | region (SEQ ID NO: 1846); ITR (SEQ ID NO: 1830) | | |
| GBA_VG11 | ITR (SEQ ID NO: 1829); CMVie (SEQ ID NO: 1831); CB | 1769 | 3560 |
| | promoter (SEQ ID NO: 1834); human beta globin intron (hGBint) | | |
| | (SEQ ID NO: 1842); signal sequence (SEQ ID NO: 1852); GBA | | |
| | Variant 3 coding sequence (SEQ ID NO: 1781); G4S3 linker | | |
| | coding sequence (SEQ ID NO: 1730); ApoB coding sequence | | |
| | (SEQ ID NO: 1795); polyA signal region (SEQ ID NO: 1846); | | |
| | ITR (SEQ ID NO: 1830) | | |
| GBA_VG12 | ITR (SEQ ID NO: 1829); CMVie (SEQ ID NO: 1831); CB | 1770 | 3500 |
| | promoter (SEQ ID NO: 1834); human beta globin intron (hGBint) | | |
| | (SEQ ID NO: 1842); signal sequence (SEQ ID NO: 1852); TAT | | |
| | coding sequence (SEQ ID NO: 1793); G4S3 linker coding | | |
| | sequence (SEQ ID NO: 1730); GBA Variant 3 coding sequence | | |
| | (SEQ ID NO: 1781); polyA signal region (SEQ ID NO: 1846); | | |
| | ITR (SEQ ID NO: 1830) | | |
| GBA_VG13 | ITR (SEQ ID NO: 1829); CMVie (SEQ ID NO: 1831); CB | 1771 | 3458 |
| | promoter (SEQ ID NO: 1834); human beta globin intron (hGBint) | | |
| | (SEQ ID NO: 1842); signal sequence (SEQ ID NO: 1852); GBA | | |
| | Variant 3 coding sequence (SEQ ID NO: 1781); Lysosomal | | |
| | targeting sequence 5 (LTS5) (SEQ ID NO: 1807); polyA signal | | |
| | region (SEQ ID NO: 1846); ITR (SEQ ID NO: 1830) | | |
| GBA_VG14 | ITR (SEQ ID NO: 1829); CMVie (SEQ ID NO: 1831); CB | 1809 | 3941 |
| | promoter (SEQ ID NO: 1834); human beta globin intron (hGBint) | | |
| | (SEQ ID NO: 1842); signal sequence (SEQ ID NO: 1852); | | |
| | Lysosomal targeting sequence 2 (LTS2) (SEQ ID NO: 1801); | | |
| | GBA Variant 3 coding sequence (SEQ ID NO: 1781); Furin | | |
| | cleavage site coding sequence (SEQ ID NO: 1724); T2A coding | | |
| | sequence (SEQ ID NO: 1726); signal sequence (SEQ ID NO: | | |
| | 1856); SAPC coding sequence (SEQ ID NO: 1787); polyA signal | | |
| | region (SEQ ID NO: 1846); ITR (SEQ ID NO: 1830) | | |
| GBA_VG15 | ITR (SEQ ID NO: 1829); CMVie (SEQ ID NO: 1831); CB | 1810 | 3977 |
| | promoter (SEQ ID NO: 1834); human beta globin intron (hGBint) | | |
| | (SEQ ID NO: 1842); signal sequence (SEQ ID NO: 1852); GBA | | |
| | Variant 3 coding sequence (SEQ ID NO: 1781); G4S3 linker | | |
| | coding sequence (SEQ ID NO: 1730); ApoEII coding sequence | | |
| | (SEQ ID NO: 1797); Furin cleavage site coding sequence (SEQ ID | | |
| | NO: 1724); T2A coding sequence (SEQ ID NO: 1726); signal | | |
| | sequence (SEQ ID NO: 1856); SAPC coding sequence (SEQ ID | | |
| | NO: 1787); polyA signal region (SEQ ID NO: 1846); ITR (SEQ | | |
| | ID NO: 1830) | | |
| GBA_VG16 | ITR (SEQ ID NO: 1829); CMVie (SEQ ID NO: 1831); CB | 1811 | 4040 |
| | promoter (SEQ ID NO: 1834); human beta globin intron (hGBint) | | |
| | (SEQ ID NO: 1842); signal sequence (SEQ ID NO: 1852); | | |
| | Lysosomal targeting sequence 2 (LTS2) (SEQ ID NO: 1801); | | |
| | GBA Variant 3 coding sequence (SEQ ID NO: 1781); G4S3 linker | | |
| | coding sequence (SEQ ID NO: 1730); ApoEII coding sequence | | |
| | (SEQ ID NO: 1797); Furin cleavage site coding sequence (SEQ ID | | |
| | NO: 1724); T2A coding sequence (SEQ ID NO: 1726); signal | | |
| | sequence (SEQ ID NO: 1856); SAPC coding sequence (SEQ ID | | |
| | NO: 1787); polyA signal region (SEQ ID NO: 1846); ITR (SEQ | | |
| | ID NO: 1830) | | |
| GBA_VG17 | ITR (SEQ ID NO: 1829); CMVie (SEQ ID NO: 1831); CB | 1812 | 3413 |
| | promoter (SEQ ID NO: 1834); human beta globin intron (hGBint) | | |
| | (SEQ ID NO: 1842); signal sequence (SEQ ID NO: 1850); GBA | | |
| | Variant 1 coding sequence (SEQ ID NO: 1773); polyA signal | | |
| | region (SEQ ID NO: 1846); ITR (SEQ ID NO: 1830) | | |
| GBA_VG18 | ITR (SEQ ID NO: 1829); EF-1α promoter variant 2 (SEQ ID NO: | 1813 | 3375 |
| | 1839); signal sequence (SEQ ID NO: 1850); GBA Variant 1 | | |
| | coding sequence (SEQ ID NO: 1773); polyA signal region (SEQ | | |
| | ID NO: 1846); ITR (SEQ ID NO: 1830) | | |
| GBA_VG19 | ITR (SEQ ID NO: 1829); CMVie (SEQ ID NO: 1831); CMV | 1814 | 3360 |
| | promoter (SEQ ID NO: 1832); human beta globin intron (hGBint) | | |
| | (SEQ ID NO: 1842); signal sequence (SEQ ID NO: 1850); GBA | | |
| | Variant 1 coding sequence (SEQ ID NO: 1773); polyA signal | | |
| | region (SEQ ID NO: 1846); ITR (SEQ ID NO: 1830) | | |
| GBA_VG20 | ITR (SEQ ID NO: 1829); CAG promoter (SEQ ID NO: 1835); | 1815 | 3901 |
| | signal sequence (SEQ ID NO: 1850); GBA Variant 1 coding | | |
| | sequence (SEQ ID NO: 1773); polyA signal region (SEQ ID NO: | | |
| | 1846); ITR (SEQ ID NO: 1830) | | |
| GBA_VG21 | ITR (SEQ ID NO: 1829); CMVie (SEQ ID NO: 1831); CB | 1816 | 3413 |
| | promoter (SEQ ID NO: 1834); human beta globin intron (hGBint) | | |
| | (SEQ ID NO: 1842); signal sequence (SEQ ID NO: 1851); GBA | | |
| | Variant 2 coding sequence (SEQ ID NO: 1777); polyA signal | | |
| | region (SEQ ID NO: 1846); ITR (SEQ ID NO: 1830) | | |
| GBA_VG22 | ITR (SEQ ID NO: 1829); CMVie (SEQ ID NO: 1831); CB | 1817 | 3878 |
| | promoter (SEQ ID NO: 1834); human beta globin intron (hGBint) | | |
| | (SEQ ID NO: 1842); signal sequence (SEQ ID NO: 1851); GBA | | |
| | Variant 2 coding sequence (SEQ ID NO: 1777); Furin cleavage | | |
| | site coding sequence (SEQ ID NO: 1724); T2A coding sequence | | |
| | (SEQ ID NO: 1726); signal sequence (SEQ ID NO: 1856); SAPC | | |
| | coding sequence (SEQ ID NO: 1787); polyA signal region (SEQ | | |
| | ID NO: 1846); ITR (SEQ ID NO: 1830) | | |
| GBA_VG23 | ITR (SEQ ID NO: 1829); CMVie (SEQ ID NO: 1831); CB | 1818 | 3512 |
| | promoter (SEQ ID NO: 1834); human beta globin intron (hGBint) | | |
| | (SEQ ID NO: 1842); signal sequence (SEQ ID NO: 1851); GBA | | |
| | Variant 2 coding sequence (SEQ ID NO: 1777); G4S3 linker | | |
| | coding sequence (SEQ ID NO: 1730); ApoEII coding sequence | | |
| | (SEQ ID NO: 1797); polyA signal region (SEQ ID NO: 1846); | | |
| | ITR (SEQ ID NO: 1830) | | |
| GBA_VG24 | ITR (SEQ ID NO: 1829); CMVie (SEQ ID NO: 1831); CB | 1819 | 3476 |
| | promoter (SEQ ID NO: 1834); human beta globin intron (hGBint) | | |
| | (SEQ ID NO: 1842); signal sequence (SEQ ID NO: 1851); | | |
| | Lysosomal targeting sequence 2 (LTS2) (SEQ ID NO: 1801); | | |
| | GBA Variant 2 coding sequence (SEQ ID NO: 1777); polyA | | |
| | signal region (SEQ ID NO: 1846); ITR (SEQ ID NO: 1830) | | |
| GBA_VG25 | ITR (SEQ ID NO: 1829); CMVie (SEQ ID NO: 1831); CB | 1820 | 3428 |
| | promoter (SEQ ID NO: 1834); human beta globin intron (hGBint) | | |
| | (SEQ ID NO: 1842); signal sequence (SEQ ID NO: 1851); GBA | | |
| | Variant 2 coding sequence (SEQ ID NO: 1777); Lysosomal | | |
| | targeting sequence 4 (LTS4) (SEQ ID NO: 1805); polyA signal | | |
| | region (SEQ ID NO: 1846); ITR (SEQ ID NO: 1830) | | |
| GBA_VG26 | ITR (SEQ ID NO: 1829); EF -1α promoter variant 3 (SEQ ID NO: | 1821 | 3375 |
| | 1840); signal sequence (SEQ ID NO: 1851); GBA Variant 2 | | |
| | coding sequence (SEQ ID NO: 1777); polyA signal region (SEQ | | |
| | ID NO: 1846); ITR (SEQ ID NO: 1830) | | |
| GBA_VG27 | ITR (SEQ ID NO: 1829); CMVie (SEQ ID NO: 1831); CB | 1822 | 3878 |
| | promoter (SEQ ID NO: 1834); human beta globin intron (hGBint) | | |
| | (SEQ ID NO: 1842); signal sequence (SEQ ID NO: 1850); GBA | | |
| | Variant 1 coding sequence (SEQ ID NO: 1773); Furin cleavage | | |
| | site coding sequence (SEQ ID NO: 1724); T2A coding sequence | | |
| | (SEQ ID NO: 1726); signal sequence (SEQ ID NO: 1856); SAPC | | |
| | coding sequence (SEQ ID NO: 1787); polyA signal region (SEQ | | |
| | ID NO: 1846); ITR (SEQ ID NO: 1830) | | |
| GBA_VG28 | ITR (SEQ ID NO: 1829); CMVie (SEQ ID NO: 1831); CB | 1823 | 3512 |
| | promoter (SEQ ID NO: 1834); human beta globin intron (hGBint) | | |
| | (SEQ ID NO: 1842); signal sequence (SEQ ID NO: 1850); GBA | | |
| | Variant 1 coding sequence (SEQ ID NO: 1773); G4S3 linker | | |
| | coding sequence (SEQ ID NO: 1730); ApoEII coding sequence | | |
| | (SEQ ID NO: 1797); polyA signal region (SEQ ID NO: 1846); | | |
| | ITR (SEQ ID NO: 1830) | | |
| GBA_VG29 | ITR (SEQ ID NO: 1829); CMVie (SEQ ID NO: 1831); CB | 1824 | 3476 |
| | promoter (SEQ ID NO: 1834); human beta globin intron (hGBint) | | |
| | (SEQ ID NO: 1842); signal sequence (SEQ ID NO: 1850); | | |
| | Lysosomal targeting sequence 2 (LTS2) (SEQ ID NO: 1801); | | |
| | GBA Variant 1 coding sequence (SEQ ID NO: 1773); polyA | | |
| | signal region (SEQ ID NO: 1846); ITR (SEQ ID NO: 1830) | | |
| GBA_VG30 | ITR (SEQ ID NO: 1829); CMVie (SEQ ID NO: 1831); CB | 1825 | 3428 |
| | promoter (SEQ ID NO: 1834); human beta globin intron (hGBint) | | |
| | (SEQ ID NO: 1842); signal sequence (SEQ ID NO: 1850); GBA | | |
| | Variant 1 coding sequence (SEQ ID NO: 1773); Lysosomal | | |
| | targeting sequence 4 (LTS4) (SEQ ID NO: 1805); polyA signal | | |
| | region (SEQ ID NO: 1846); ITR (SEQ ID NO: 1830) | | |
| GBA_VG31 | ITR (SEQ ID NO: 1829); CMVie (SEQ ID NO: 1831); CB | 1826 | 3500 |
| | promoter (SEQ ID NO: 1834); human beta globin intron (hGBint) | | |
| | (SEQ ID NO: 1842); signal sequence (SEQ ID NO: 1851); GBA | | |
| | Variant 2 coding sequence (SEQ ID NO: 1777); G4S3 linker | | |
| | coding sequence (SEQ ID NO: 1730); TAT coding sequence (SEQ | | |
| | ID NO: 1793); polyA signal region (SEQ ID NO: 1846); ITR | | |
| | (SEQ ID NO: 1830) | | |
| GBA_VG32 | ITR (SEQ ID NO: 1829); CMVie (SEQ ID NO: 1831); CB | 1827 | 3500 |
| | promoter (SEQ ID NO: 1834); human beta globin intron (hGBint) | | |
| | (SEQ ID NO: 1842); signal sequence (SEQ ID NO: 1850); GBA | | |
| | Variant 1 coding sequence (SEQ ID NO: 1773); G4S3 linker | | |
| | coding sequence (SEQ ID NO: 1730); TAT coding sequence (SEQ | | |
| | ID NO: 1793); polyA signal region (SEQ ID NO: 1846); ITR | | |
| | (SEQ ID NO: 1830) | | |
| GBA_VG33 | ITR (SEQ ID NO: 1829); CMVie (SEQ ID NO: 1831); CB | 1828 | 3571 |
| | promoter (SEQ ID NO: 1834); human beta globin intron (hGBint) | | |
| | (SEQ ID NO: 1842); signal sequence (SEQ ID NO: 1850); GBA | | |
| | Variant 1 coding sequence (SEQ ID NO: 1773); miR183 binding | | |
| | site (SEQ ID NO: 1847); Spacer (SEQ ID NO: 1848); miR183 | | |
| | binding site (SEQ ID NO: 1847); Spacer (SEQ ID NO: 1848); | | |
| | miR183 binding site (SEQ ID NO: 1847); Spacer (SEQ ID NO: | | |
| | 1848); mirl83 binding site (SEQ ID NO: 1847); polyA signal | | |
| | region (SEQ ID NO: 1846); ITR (SEQ ID NO: 1830) | | |
| GBA_VG34 | ITR (SEQ ID NO: 1829); CMVie (SEQ ID NO: 1831); CB | 1870 | 3571 |
| | promoter (SEQ ID NO: 1834); human beta globin intron (hGBint) | | |
| | (SEQ ID NO: 1842); signal sequence (SEQ ID NO: 1851); GBA | | |
| | Variant 2 coding sequence (SEQ ID NO: 1777); miR183 binding | | |
| | site (SEQ ID NO: 1847); Spacer (SEQ ID NO: 1848); miR183 | | |
| | binding site (SEQ ID NO: 1847); Spacer (SEQ ID NO: 1848); | | |
| | miR183 binding site (SEQ ID NO: 1847); Spacer (SEQ ID NO: | | |
| | 1848); mir183 binding site (SEQ ID NO: 1847); polyA signal | | |
| | region (SEQ ID NO: 1846); ITR (SEQ ID NO: 1830) | | |

TABLE 19
Exemplary ITR to ITR sequences encoding a GBA protein

| | | SEQ |
|---|---|---|
| Construct | | ID |
| ID | Sequence | NO: |
| GBA_VG17 | ctgcgcgctcgctcgctcactgaggccgcccgggcaaagcccgggcgtcgggcgac | 1812 |
| | ctttggtcgcccggcctcagtgagcgagcgagcgcgcagagagggagtggccaact | |
| | ccatcactaggggttccttgtagttaatgattaacccgccatgctacttatctacc | |
| | agggtaatggggatcctctagaactatagctagtcGACATTGATTATTGACTAGTT | |
| | ATTAATAGTAATCAATTACGGGGTCATTAGTTCATAGCCCATATATGGAGTTCCGC | |
| | GTTACATAACTTACGGTAAATGGCCCGCCTGGCTGACCGCCCAACGACCCCCGCCC | |
| | ATTGACGTCAATAATGACGTATGTTCCCATAGTAACGCCAATAGGGACTTTCCATT | |
| | GACGTCAATGGGTGGAGTATTTACGGTAAACTGCCCACTTGGCAGTACATCAAGTG | |
| | TATCATATGCCAAGTACGCCCCCTATTGACGTCAATGACGGTAAATGGCCCGCCTG | |
| | GCATTATGCCCAGTACATGACCTTATGGGACTTTCCTACTTGGCAGTACATCTACG | |
| | TATTAGTCATCGCTATTACCATGtcgaggccacgttctgcttcactctccccatct | |
| | cccccccctccccacccccaattttgtatttatttattttttaattattttgtgca | |
| | gcgatgggggcggggggggggggcgcgcgccaggcggggcggggcggggcgagggg | |
| | cggggcggggcgaggcggagaggtgcggcggcagccaatcagagcggcgcgctccg | |
| | aaagtttccttttatggcgaggcggcggcggcggcggccctataaaaagcgaagcg | |
| | cgcggcgggcgggagcaagcttcgtttagtgaaccgtcagatcgcctggagacgcc | |
| | atccacgctgttttgacctccatagaagacaccgggaccgatccagcctccgcgga | |
| | ttcgaatcccggccgggaacggtgcattggaacgcggattccccgtgccaagagtg | |
| | acgtaagtaccgcctatagagtctataggcccacaaaaaatgctttcttcttttaa | |
| | tatacttttttgtttatcttatttctaatactttccctaatctctttctttcaggg | |
| | caataatgatacaatgtatcatgcctctttgcaccattctaaagaataacagtgat | |
| | aatttctgggttaaggcaatagcaatatttctgcatataaatatttctgcatataa | |
| | attgtaactgatgtaagaggtttcatattgctaatagcagctacaatccagctacc | |
| | attctgcttttattttatggttgggataaggctggattattctgagtccaagctag | |
| | gcccttttgctaatcatgttcatacctcttatcttcctcccacagctcctgggcaa | |
| | cgtgctggtctgtgtgctggcccatcactttggcaaagaattgggattcgaaccgg | |
| | tgccgccaccATGGAATTCTCTAGCCCATCTAGAGAGGAATGTCCTAAGCCTCTGT | |
| | CAAGAGTGTCCATCATGGCCGGCAGCCTGACAGGCCTGCTGCTGCTGCAGGCCGTG | |
| | TCCTGGGCCAGTGGAGCCCGGCCCTGCATCCCTAAGTCCTTCGGCTATTCTAGCGT | |
| | GGTCTGCGTGTGTAATGCCACTTACTGCGACAGCTTCGACCCTCCTACCTTCCCCG | |
| | CCCTTGGAACATTCAGCAGATACGAGAGCACCAGAAGCGGCAGAAGAATGGAACTG | |
| | AGCATGGGCCCAATCCAGGCCAACCACACCGGCACCGGCCTGCTGCTGACACTGCA | |
| | ACCTGAGCAGAAGTTCCAGAAGGTGAAGGGATTTGGAGGCGCCATGACCGACGCTG | |
| | CTGCTCTGAACATCCTGGCCCTCTCCCCACCTGCTCAGAACCTGCTGCTTAAAAGC | |
| | TACTTCAGCGAGGAAGGCATCGGCTATAACATCATCAGAGTGCCCATGGCCAGCTG | |
| | CGACTTCAGCATCAGAACATACACCTACGCCGATACACCTGATGACTTCCAACTGC | |
| | ACAACTTCAGCCTGCCTGAAGAGGACACAAAGCTGAAAATCCCCCTGATCCACCGG | |
| | GCCCTGCAGCTGGCCCAGAGACCTGTGAGCCTGCTGGCCTCTCCTTGGACAAGCCC | |
| | CACCTGGCTGAAGACCAATGGAGCTGTGAACGGCAAGGGCAGCCTGAAGGGCCAGC | |
| | CCGGCGACATCTACCACCAAACCTGGGCTCGCTACTTCGTGAAATTCCTGGACGCC | |
| | TACGCTGAGCATAAGCTGCAATTTTGGGCCGTTACAGCCGAGAACGAGCCTTCTGC | |
| | CGGCCTGCTGTCTGGATATCCTTTCCAGTGCCTGGGCTTCACCCCTGAGCACCAGA | |
| | GAGACTTTATCGCCAGAGATCTGGGGCCTACCCTGGCTAACAGCACACACCACAAC | |
| | GTGCGGCTGCTGATGCTGGACGATCAGAGGCTGCTGCTCCCCCACTGGGCCAAGGT | |
| | GGTGCTGACAGATCCGGAGGCCGCCAAATACGTGCACGGCATCGCCGTCCACTGGT | |
| | ACCTGGATTTCCTGGCCCCTGCCAAGGCCACCCTGGGCGAGACACATAGACTGTTT | |
| | CCTAATACCATGCTGTTCGCCAGCGAGGCCTGCGTGGGCAGCAAGTTCTGGGAACA | |
| | GAGCGTGCGGCTGGGCAGCTGGGACAGAGGAATGCAGTACAGCCACAGCATCATTA | |
| | CCAACCTGCTGTACCACGTGGTGGGCTGGACCGACTGGAACCTGGCCCTGAACCCC | |
| | GAAGGCGGCCCCAACTGGGTGCGGAACTTCGTGGACTCTCCTATCATCGTGGATAT | |
| | TACCAAGGATACCTTTTACAAGCAGCCTATGTTCTACCACCTGGGCCACTTCAGCA | |
| | AGTTCATCCCTGAGGGCTCTCAGCGGGTGGGCCTGGTGGCCTCTCAGAAAAACGAC | |
| | CTGGATGCCGTTGCCCTGATGCACCCCGACGGCAGCGCCGTGGTGGTCGTCCTGAA | |
| | TAGAAGCTCCAAGGACGTGCCTCTGACCATCAAGGACCCCGCTGTGGGATTTCTGG | |
| | AAACCATCAGCCCTGGCTACAGCATCCACACCTACCTGTGGCGGCGGCAGtagtaa | |
| | ctcgaggacggggtgaactacgcctgaggatccgatctttttccctctgccaaaaa | |
| | ttatggggacatcatgaagccccttgagcatctgacttctggctaataaaggaaat | |
| | ttattttcattgcaatagtgtgttggaattttttgtgtctctcactcggcctaggt | |
| | agataagtagcatggcgggttaatcattaactacaaggaacccctagtgatggagt | |
| | tggccactccctctctgcgcgctcgctcgctcactgaggccgggcgaccaaaggtc | |
| | gcccgacgcccgggctttgcccgggcggcctcagtgagcgagcgagcgcgcag | |
| GBA_VG18 | ctgcgcgctcgctcgctcactgaggccgcccgggcaaagcccgggcgtcgggcgac | 1813 |
| | ctttggtcgcccggcctcagtgagcgagcgagcgcgcagagagggagtggccaact | |
| | ccatcactaggggttccttgtagttaatgattaacccgccatgctacttatctacc | |
| | agggtaatggggatcctctagaactatagctagtcgacataacgcgtgcatgcgtg | |
| | aggctccggtgcccgtcagtgggcagagcgcacatcgcccacagtccccgagaagt | |
| | tggggggaggggtcggcaattgaaccggtgcctagagaaggtggcgcggggtaaac | |
| | tgggaaagtgatgtcgtgtactggctccgcctttttcccgagggtgggggagaacc | |
| | gtatataagtgcagtagtcgccgtgaacgttctttttcgcaacgggtttgccgcca | |
| | gaacacaggtaagtgccgtgtgtggttcccgcgggcctggcctctttacgggttat | |
| | ggcccttgcgtgccttgaattacttccacctggctgcagtacgtgattcttgatcc | |
| | cgagcttcgggttggaagtgggtgggagagttcgaggccttgcgcttaaggagccc | |
| | cttcgcctcgtgcttgagttgaggcctggcctgggcgctggggccgccgcgtgcga | |
| | atctggtggcaccttcgcgcctgtctcgctgctttcgataagtctctagccattta | |
| | aaatttttgatgacctgctgcgacgctttttttctggcaagatagtcttgtaaatg | |
| | cgggccaagatctgcacactggtatttcggtttttggggccgcgggcggcgacggg | |
| | gcccgtgcgtcccagcgcacatgttcggcgaggcggggcctgcgagcgcggccacc | |
| | gagaatcggacgggggtagtctcaagctggccggcctgctctggtgcctggcctcg | |
| | cgccgccgtgtatcgccccgccctgggcggcaaggctggcccggtcggcaccagtt | |
| | gcgtgagcggaaagatggccgcttcccggccctgctgcagggagctcaaaatggag | |
| | gacgcggcgctcgggagagcgggcgggtgagtcacccacacaaaggaaaagggcct | |
| | ttccgtcctcagccgtcgcttcatgtgactccacggagtaccgggcgccgtccagg | |
| | cacctcgattagttctcgagcttttggagtacgtcgtctttaggttggggggaggg | |
| | gttttatgcgatggagtttccccacactgagtgggtggagactgaagttaggccag | |
| | cttggcacttgatgtaattctccttggaatttgccctttttgagtttggatcttgg | |
| | ttcattctcaagcctcagacagtggttcaaagtttttttcttccatttcaggtgtc | |
| | gtgagggattcgaaccggtgccgccaccATGGAATTCTCTAGCCCATCTAGAGAGG | |
| | AATGTCCTAAGCCTCTGTCAAGAGTGTCCATCATGGCCGGCAGCCTGACAGGCCTG | |
| | CTGCTGCTGCAGGCCGTGTCCTGGGCCAGTGGAGCCCGGCCCTGCATCCCTAAGTC | |
| | CTTCGGCTATTCTAGCGTGGTCTGCGTGTGTAATGCCACTTACTGCGACAGCTTCG | |
| | ACCCTCCTACCTTCCCCGCCCTTGGAACATTCAGCAGATACGAGAGCACCAGAAGC | |
| | GGCAGAAGAATGGAACTGAGCATGGGCCCAATCCAGGCCAACCACACCGGCACCGG | |
| | CCTGCTGCTGACACTGCAACCTGAGCAGAAGTTCCAGAAGGTGAAGGGATTTGGAG | |
| | GCGCCATGACCGACGCTGCTGCTCTGAACATCCTGGCCCTCTCCCCACCTGCTCAG | |
| | AACCTGCTGCTTAAAAGCTACTTCAGCGAGGAAGGCATCGGCTATAACATCATCAG | |
| | AGTGCCCATGGCCAGCTGCGACTTCAGCATCAGAACATACACCTACGCCGATACAC | |
| | CTGATGACTTCCAACTGCACAACTTCAGCCTGCCTGAAGAGGACACAAAGCTGAAA | |
| | ATCCCCCTGATCCACCGGGCCCTGCAGCTGGCCCAGAGACCTGTGAGCCTGCTGGC | |
| | CTCTCCTTGGACAAGCCCCACCTGGCTGAAGACCAATGGAGCTGTGAACGGCAAGG | |
| | GCAGCCTGAAGGGCCAGCCCGGCGACATCTACCACCAAACCTGGGCTCGCTACTTC | |
| | GTGAAATTCCTGGACGCCTACGCTGAGCATAAGCTGCAATTTTGGGCCGTTACAGC | |
| | CGAGAACGAGCCTTCTGCCGGCCTGCTGTCTGGATATCCTTTCCAGTGCCTGGGCT | |
| | TCACCCCTGAGCACCAGAGAGACTTTATCGCCAGAGATCTGGGGCCTACCCTGGCT | |
| | AACAGCACACACCACAACGTGCGGCTGCTGATGCTGGACGATCAGAGGCTGCTGCT | |
| | CCCCCACTGGGCCAAGGTGGTGCTGACAGATCCGGAGGCCGCCAAATACGTGCACG | |
| | GCATCGCCGTCCACTGGTACCTGGATTTCCTGGCCCCTGCCAAGGCCACCCTGGGC | |
| | GAGACACATAGACTGTTTCCTAATACCATGCTGTTCGCCAGCGAGGCCTGCGTGGG | |
| | CAGCAAGTTCTGGGAACAGAGCGTGCGGCTGGGCAGCTGGGACAGAGGAATGCAGT | |
| | ACAGCCACAGCATCATTACCAACCTGCTGTACCACGTGGTGGGCTGGACCGACTGG | |
| | AACCTGGCCCTGAACCCCGAAGGCGGCCCCAACTGGGTGCGGAACTTCGTGGACTC | |
| | TCCTATCATCGTGGATATTACCAAGGATACCTTTTACAAGCAGCCTATGTTCTACC | |
| | ACCTGGGCCACTTCAGCAAGTTCATCCCTGAGGGCTCTCAGCGGGTGGGCCTGGTG | |
| | GCCTCTCAGAAAAACGACCTGGATGCCGTTGCCCTGATGCACCCCGACGGCAGCGC | |
| | CGTGGTGGTCGTCCTGAATAGAAGCTCCAAGGACGTGCCTCTGACCATCAAGGACC | |
| | CCGCTGTGGGATTTCTGGAAACCATCAGCCCTGGCTACAGCATCCACACCTACCTG | |
| | TGGCGGCGGCAGtagtaactcgaggacggggtgaactacgcctgaggatccgatct | |
| | ttttccctctgccaaaaattatggggacatcatgaagccccttgagcatctgactt | |
| | ctggctaataaaggaaatttattttcattgcaatagtgtgttggaattttttgtgt | |
| | ctctcactcggcctaggtagataagtagcatggcgggttaatcattaactacaagg | |
| | aacccctagtgatggagttggccactccctctctgcgcgctcgctcgctcactgag | |
| | gccgggcgaccaaaggtcgcccgacgcccgggctttgcccgggcggcctcagtgag | |
| | cgagcgagcgcgcag | |
| GBA_VG27 | ctgcgcgctcgctcgctcactgaggccgcccgggcaaagcccgggcgtcgggcgac | 1822 |
| | ctttggtcgcccggcctcagtgagcgagcgagcgcgcagagagggagtggccaact | |
| | ccatcactaggggttcctTGTAGTTAATGATTAACCCGCCATGCTACTTATCTACC | |
| | AGGGTAATGGGGATCCTCTAGAACTATAGCTAGTCGACATTGATTATTGACTAGTT | |
| | ATTAATAGTAATCAATTACGGGGTCATTAGTTCATAGCCCATATATGGAGTTCCGC | |
| | GTTACATAACTTACGGTAAATGGCCCGCCTGGCTGACCGCCCAACGACCCCCGCCC | |
| | ATTGACGTCAATAATGACGTATGTTCCCATAGTAACGCCAATAGGGACTTTCCATT | |
| | GACGTCAATGGGTGGAGTATTTACGGTAAACTGCCCACTTGGCAGTACATCAAGTG | |
| | TATCATATGCCAAGTACGCCCCCTATTGACGTCAATGACGGTAAATGGCCCGCCTG | |
| | GCATTATGCCCAGTACATGACCTTATGGGACTTTCCTACTTGGCAGTACATCTACG | |
| | TATTAGTCATCGCTATTACCATGTCGAGGccacgttctgcttcactctccccatct | |
| | cccccccctccccacccccaattttgtatttatttattttttaattattttgtgca | |
| | gcgatgggggcggggggggggggcgcgcgccaggcggggcggggcggggcgagggg | |
| | cggggcggggcgaggcggagaggtgcggcggcagccaatcagagcggcgcgctccg | |
| | aaagtttccttttatggcgaggcggcggcggcggcggccctataaaaagcgaagcg | |
| | cgcggcgggCGGGAGCAAGCTTCGTTTAGTGAACCGtcagatcgcctggagacgcc | |
| | atccacgctgttttgacctccatagaagacaccgggaccgatccagcctccgcgga | |
| | ttcgaatcccggccgggaacggtgcattggaacgcggattccccgtgccaagagtg | |
| | acgtaagtaccgcctatagagtctataggcccacaaaaaatgctttcttcttttaa | |
| | tatacttttttgtttatcttatttctaatactttccctaatctctttctttcaggg | |
| | caataatgatacaatgtatcatgcctctttgcaccattctaaagaataacagtgat | |
| | aatttctgggttaaggcaatagcaatatttctgcatataaatatttctgcatataa | |
| | attgtaactgatgtaagaggtttcatattgctaatagcagctacaatccagctacc | |
| | attctgcttttattttatggttgggataaggctggattattctgagtccaagctag | |
| | gcccttttgctaatcatgttcatacctcttatcttcctcccacagctcctgggcaa | |
| | cgtgctggtctgtgtgctggcccatcactttggcaaagaattGGGATTCGAACCGG | |
| | TGCCGCCACCATGGAATTCTCTAGCCCATCTAGAGAGGAATGTCCTAAGCCTCTGT | |
| | CAAGAGTGTCCATCATGGCCGGCAGCCTGACAGGCCTGCTGCTGCTGCAGGCCGTG | |
| | TCCTGGGCCAGTGGAGCCCGGCCCTGCATCCCTAAGTCCTTCGGCTATTCTAGCGT | |
| | GGTCTGCGTGTGTAATGCCACTTACTGCGACAGCTTCGACCCTCCTACCTTCCCCG | |
| | CCCTTGGAACATTCAGCAGATACGAGAGCACCAGAAGCGGCAGAAGAATGGAACTG | |
| | AGCATGGGCCCAATCCAGGCCAACCACACCGGCACCGGCCTGCTGCTGACACTGCA | |
| | ACCTGAGCAGAAGTTCCAGAAGGTGAAGGGATTTGGAGGCGCCATGACCGACGCTG | |
| | CTGCTCTGAACATCCTGGCCCTCTCCCCACCTGCTCAGAACCTGCTGCTTAAAAGC | |
| | TACTTCAGCGAGGAAGGCATCGGCTATAACATCATCAGAGTGCCCATGGCCAGCTG | |
| | CGACTTCAGCATCAGAACATACACCTACGCCGATACACCTGATGACTTCCAACTGC | |
| | ACAACTTCAGCCTGCCTGAAGAGGACACAAAGCTGAAAATCCCCCTGATCCACCGG | |
| | GCCCTGCAGCTGGCCCAGAGACCTGTGAGCCTGCTGGCCTCTCCTTGGACAAGCCC | |
| | CACCTGGCTGAAGACCAATGGAGCTGTGAACGGCAAGGGCAGCCTGAAGGGCCAGC | |
| | CCGGCGACATCTACCACCAAACCTGGGCTCGCTACTTCGTGAAATTCCTGGACGCC | |
| | TACGCTGAGCATAAGCTGCAATTTTGGGCCGTTACAGCCGAGAACGAGCCTTCTGC | |
| | CGGCCTGCTGTCTGGATATCCTTTCCAGTGCCTGGGCTTCACCCCTGAGCACCAGA | |
| | GAGACTTTATCGCCAGAGATCTGGGGCCTACCCTGGCTAACAGCACACACCACAAC | |
| | GTGCGGCTGCTGATGCTGGACGATCAGAGGCTGCTGCTCCCCCACTGGGCCAAGGT | |
| | GGTGCTGACAGATCCGGAGGCCGCCAAATACGTGCACGGCATCGCCGTCCACTGGT | |
| | ACCTGGATTTCCTGGCCCCTGCCAAGGCCACCCTGGGCGAGACACATAGACTGTTT | |
| | CCTAATACCATGCTGTTCGCCAGCGAGGCCTGCGTGGGCAGCAAGTTCTGGGAACA | |
| | GAGCGTGCGGCTGGGCAGCTGGGACAGAGGAATGCAGTACAGCCACAGCATCATTA | |
| | CCAACCTGCTGTACCACGTGGTGGGCTGGACCGACTGGAACCTGGCCCTGAACCCC | |
| | GAAGGCGGCCCCAACTGGGTGCGGAACTTCGTGGACTCTCCTATCATCGTGGATAT | |
| | TACCAAGGATACCTTTTACAAGCAGCCTATGTTCTACCACCTGGGCCACTTCAGCA | |
| | AGTTCATCCCTGAGGGCTCTCAGCGGGTGGGCCTGGTGGCCTCTCAGAAAAACGAC | |
| | CTGGATGCCGTTGCCCTGATGCACCCCGACGGCAGCGCCGTGGTGGTCGTCCTGAA | |
| | TAGAAGCTCCAAGGACGTGCCTCTGACCATCAAGGACCCCGCTGTGGGATTTCTGG | |
| | AAACCATCAGCCCTGGCTACAGCATCCACACCTACCTGTGGCGGCGGCAGAgaaag | |
| | aggcgagagggcagaggaagtcttctaacatgcggtgacgtggaggagaatcccgg | |
| | ccctATGTACGCCCTCTTCCTCCTGGCCAGCCTCCTGGGCGCGGCTCTAGCCgtga | |
| | aagagatgcccatgcagactctggtccccgccaaagtggcctccaagaatgtcatc | |
| | cctgccctggaactggtggagcccattaagaagcacgaggtcccagcaaagtctga | |
| | tgtttactgtgaggtgtgtgaattcctggtgaaggaggtgaccaagctgattgaca | |
| | acaacaagactgagaaagaaatactcgacgcttttgacaaaatgtgctcgaagctg | |
| | ccgaagtccctgtcggaagagtgccaggaggtggtggacacgtacggcagctccat | |
| | cctgtccatcctgctggaggaggtcagccctgagctggtgtgcagcatgctgcacc | |
| | tctgctctggcTAGTAACTCGAGGACGGGGTGAACTACGCCTGAGGATCCgatctt | |
| | tttccctctgccaaaaattatggggacatcatgaagccccttgagcatctgacttc | |
| | tggctaataaaggaaatttattttcattgcaatagtgtgttggaattttttgtgtc | |
| | tctcactcgGCCTAGGTAGATAAGTAGCATGGCGGGTTAATCATTAACTACAagga | |
| | acccctagtgatggagttggccactccctctctgcgcgctcgctcgctcactgagg | |
| | ccgggcgaccaaaggtcgcccgacgcccgggctttgcccgggcggcctcagtgagc | |
| | gagcgagcgcgcag | |
| GBA_VG29 | ctgcgcgctcgctcgctcactgaggccgcccgggcaaagcccgggcgtcgggcgac | 1824 |
| | ctttggtcgcccggcctcagtgagcgagcgagcgcgcagagagggagtggccaact | |
| | ccatcactaggggttcctTGTAGTTAATGATTAACCCGCCATGCTACTTATCTACC | |
| | AGGGTAATGGGGATCCTCTAGAACTATAGCTAGTCGACATTGATTATTGACTAGTT | |
| | ATTAATAGTAATCAATTACGGGGTCATTAGTTCATAGCCCATATATGGAGTTCCGC | |
| | GTTACATAACTTACGGTAAATGGCCCGCCTGGCTGACCGCCCAACGACCCCCGCCC | |
| | ATTGACGTCAATAATGACGTATGTTCCCATAGTAACGCCAATAGGGACTTTCCATT | |
| | GACGTCAATGGGTGGAGTATTTACGGTAAACTGCCCACTTGGCAGTACATCAAGTG | |
| | TATCATATGCCAAGTACGCCCCCTATTGACGTCAATGACGGTAAATGGCCCGCCTG | |
| | GCATTATGCCCAGTACATGACCTTATGGGACTTTCCTACTTGGCAGTACATCTACG | |
| | TATTAGTCATCGCTATTACCATGTCGAGGccacgttctgcttcactctccccatct | |
| | cccccccctccccacccccaattttgtatttatttattttttaattattttgtgca | |
| | gcgatgggggcggggggggggggcgcgcgccaggcggggcggggcggggcgagggg | |
| | cggggcggggcgaggcggagaggtgcggcggcagccaatcagagcggcgcgctccg | |
| | aaagtttccttttatggcgaggcggcggcggcggcggccctataaaaagcgaagcg | |
| | cgcggcgggCGGGAGCAAGCTTCGTTTAGTGAACCGtcagatcgcctggagacgcc | |
| | atccacgctgttttgacctccatagaagacaccgggaccgatccagcctccgcgga | |
| | ttcgaatcccggccgggaacggtgcattggaacgcggattccccgtgccaagagtg | |
| | acgtaagtaccgcctatagagtctataggcccacaaaaaatgctttcttcttttaa | |
| | tatacttttttgtttatcttatttctaatactttccctaatctctttctttcaggg | |
| | caataatgatacaatgtatcatgcctctttgcaccattctaaagaataacagtgat | |
| | aatttctgggttaaggcaatagcaatatttctgcatataaatatttctgcatataa | |
| | attgtaactgatgtaagaggtttcatattgctaatagcagctacaatccagctacc | |
| | attctgcttttattttatggttgggataaggctggattattctgagtccaagctag | |
| | gcccttttgctaatcatgttcatacctcttatcttcctcccacagctcctgggcaa | |
| | cgtgctggtctgtgtgctggcccatcactttggcaaagaattGGGATTCGAACCGG | |
| | TGCCGCCACCATGGAATTCTCTAGCCCATCTAGAGAGGAATGTCCTAAGCCTCTGT | |
| | CAAGAGTGTCCATCATGGCCGGCAGCCTGACAGGCCTGCTGCTGCTGCAGGCCGTG | |
| | TCCTGGGCCAGTGGAatgaaggagaccgctgctgcaaagttcgagagacagcatat | |
| | ggatagctccacaagcgccgcaGCCCGGCCCTGCATCCCTAAGTCCTTCGGCTATT | |
| | CTAGCGTGGTCTGCGTGTGTAATGCCACTTACTGCGACAGCTTCGACCCTCCTACC | |
| | TTCCCCGCCCTTGGAACATTCAGCAGATACGAGAGCACCAGAAGCGGCAGAAGAAT | |
| | GGAACTGAGCATGGGCCCAATCCAGGCCAACCACACCGGCACCGGCCTGCTGCTGA | |
| | CACTGCAACCTGAGCAGAAGTTCCAGAAGGTGAAGGGATTTGGAGGCGCCATGACC | |
| | GACGCTGCTGCTCTGAACATCCTGGCCCTCTCCCCACCTGCTCAGAACCTGCTGCT | |
| | TAAAAGCTACTTCAGCGAGGAAGGCATCGGCTATAACATCATCAGAGTGCCCATGG | |
| | CCAGCTGCGACTTCAGCATCAGAACATACACCTACGCCGATACACCTGATGACTTC | |
| | CAACTGCACAACTTCAGCCTGCCTGAAGAGGACACAAAGCTGAAAATCCCCCTGAT | |
| | CCACCGGGCCCTGCAGCTGGCCCAGAGACCTGTGAGCCTGCTGGCCTCTCCTTGGA | |
| | CAAGCCCCACCTGGCTGAAGACCAATGGAGCTGTGAACGGCAAGGGCAGCCTGAAG | |
| | GGCCAGCCCGGCGACATCTACCACCAAACCTGGGCTCGCTACTTCGTGAAATTCCT | |
| | GGACGCCTACGCTGAGCATAAGCTGCAATTTTGGGCCGTTACAGCCGAGAACGAGC | |
| | CTTCTGCCGGCCTGCTGTCTGGATATCCTTTCCAGTGCCTGGGCTTCACCCCTGAG | |
| | CACCAGAGAGACTTTATCGCCAGAGATCTGGGGCCTACCCTGGCTAACAGCACACA | |
| | CCACAACGTGCGGCTGCTGATGCTGGACGATCAGAGGCTGCTGCTCCCCCACTGGG | |
| | CCAAGGTGGTGCTGACAGATCCGGAGGCCGCCAAATACGTGCACGGCATCGCCGTC | |
| | CACTGGTACCTGGATTTCCTGGCCCCTGCCAAGGCCACCCTGGGCGAGACACATAG | |
| | ACTGTTTCCTAATACCATGCTGTTCGCCAGCGAGGCCTGCGTGGGCAGCAAGTTCT | |
| | GGGAACAGAGCGTGCGGCTGGGCAGCTGGGACAGAGGAATGCAGTACAGCCACAGC | |
| | ATCATTACCAACCTGCTGTACCACGTGGTGGGCTGGACCGACTGGAACCTGGCCCT | |
| | GAACCCCGAAGGCGGCCCCAACTGGGTGCGGAACTTCGTGGACTCTCCTATCATCG | |
| | TGGATATTACCAAGGATACCTTTTACAAGCAGCCTATGTTCTACCACCTGGGCCAC | |
| | TTCAGCAAGTTCATCCCTGAGGGCTCTCAGCGGGTGGGCCTGGTGGCCTCTCAGAA | |
| | AAACGACCTGGATGCCGTTGCCCTGATGCACCCCGACGGCAGCGCCGTGGTGGTCG | |
| | TCCTGAATAGAAGCTCCAAGGACGTGCCTCTGACCATCAAGGACCCCGCTGTGGGA | |
| | TTTCTGGAAACCATCAGCCCTGGCTACAGCATCCACACCTACCTGTGGCGGCGGCA | |
| | GTAGTAACTCGAGGACGGGGTGAACTACGCCTGAGGATCCgatctttttccctctg | |
| | ccaaaaattatggggacatcatgaagccccttgagcatctgacttctggctaataa | |
| | aggaaatttattttcattgcaatagtgtgttggaattttttgtgtctctcactcgG | |
| | CCTAGGTAGATAAGTAGCATGGCGGGTTAATCATTAACTACAaggaacccctagtg | |
| | atggagttggccactccctctctgcgcgctcgctcgctcactgaggccgggcgacc | |
| | aaaggtcgcccgacgcccgggctttgcccgggcggcctcagtgagcgagcgagcgc | |
| | gcag | |
| GBA_VG32 | ctgcgcgctcgctcgctcactgaggccgcccgggcaaagcccgggcgtcgggcgac | 1827 |
| | ctttggtcgcccggcctcagtgagcgagcgagcgcgcagagagggagtggccaact | |
| | ccatcactaggggttcctTGTAGTTAATGATTAACCCGCCATGCTACTTATCTACC | |
| | AGGGTAATGGGGATCCTCTAGAACTATAGCTAGTCGACATTGATTATTGACTAGTT | |
| | ATTAATAGTAATCAATTACGGGGTCATTAGTTCATAGCCCATATATGGAGTTCCGC | |
| | GTTACATAACTTACGGTAAATGGCCCGCCTGGCTGACCGCCCAACGACCCCCGCCC | |
| | ATTGACGTCAATAATGACGTATGTTCCCATAGTAACGCCAATAGGGACTTTCCATT | |
| | GACGTCAATGGGTGGAGTATTTACGGTAAACTGCCCACTTGGCAGTACATCAAGTG | |
| | TATCATATGCCAAGTACGCCCCCTATTGACGTCAATGACGGTAAATGGCCCGCCTG | |
| | GCATTATGCCCAGTACATGACCTTATGGGACTTTCCTACTTGGCAGTACATCTACG | |
| | TATTAGTCATCGCTATTACCATGTCGAGGccacgttctgcttcactctccccatct | |
| | cccccccctccccacccccaattttgtatttatttattttttaattattttgtgca | |
| | gcgatgggggcggggggggggggcgcgcgccaggcggggcggggcggggcgagggg | |
| | cggggcggggcgaggcggagaggtgcggcggcagccaatcagagcggcgcgctccg | |
| | aaagtttccttttatggcgaggcggcggcggcggcggccctataaaaagcgaagcg | |
| | cgcggcgggCGGGAGCAAGCTTCGTTTAGTGAACCGtcagatcgcctggagacgcc | |
| | atccacgctgttttgacctccatagaagacaccgggaccgatccagcctccgcgga | |
| | ttcgaatcccggccgggaacggtgcattggaacgcggattccccgtgccaagagtg | |
| | acgtaagtaccgcctatagagtctataggcccacaaaaaatgctttcttcttttaa | |
| | tatacttttttgtttatcttatttctaatactttccctaatctctttctttcaggg | |
| | caataatgatacaatgtatcatgcctctttgcaccattctaaagaataacagtgat | |
| | aatttctgggttaaggcaatagcaatatttctgcatataaatatttctgcatataa | |
| | attgtaactgatgtaagaggtttcatattgctaatagcagctacaatccagctacc | |
| | attctgcttttattttatggttgggataaggctggattattctgagtccaagctag | |
| | gcccttttgctaatcatgttcatacctcttatcttcctcccacagctcctgggcaa | |
| | cgtgctggtctgtgtgctggcccatcactttggcaaagaattGGGATTCGAACCGG | |
| | TGCCGCCACCATGGAATTCTCTAGCCCATCTAGAGAGGAATGTCCTAAGCCTCTGT | |
| | CAAGAGTGTCCATCATGGCCGGCAGCCTGACAGGCCTGCTGCTGCTGCAGGCCGTG | |
| | TCCTGGGCCAGTGGAGCCCGGCCCTGCATCCCTAAGTCCTTCGGCTATTCTAGCGT | |
| | GGTCTGCGTGTGTAATGCCACTTACTGCGACAGCTTCGACCCTCCTACCTTCCCCG | |
| | CCCTTGGAACATTCAGCAGATACGAGAGCACCAGAAGCGGCAGAAGAATGGAACTG | |
| | AGCATGGGCCCAATCCAGGCCAACCACACCGGCACCGGCCTGCTGCTGACACTGCA | |
| | ACCTGAGCAGAAGTTCCAGAAGGTGAAGGGATTTGGAGGCGCCATGACCGACGCTG | |
| | CTGCTCTGAACATCCTGGCCCTCTCCCCACCTGCTCAGAACCTGCTGCTTAAAAGC | |
| | TACTTCAGCGAGGAAGGCATCGGCTATAACATCATCAGAGTGCCCATGGCCAGCTG | |
| | CGACTTCAGCATCAGAACATACACCTACGCCGATACACCTGATGACTTCCAACTGC | |
| | ACAACTTCAGCCTGCCTGAAGAGGACACAAAGCTGAAAATCCCCCTGATCCACCGG | |
| | GCCCTGCAGCTGGCCCAGAGACCTGTGAGCCTGCTGGCCTCTCCTTGGACAAGCCC | |
| | CACCTGGCTGAAGACCAATGGAGCTGTGAACGGCAAGGGCAGCCTGAAGGGCCAGC | |
| | CCGGCGACATCTACCACCAAACCTGGGCTCGCTACTTCGTGAAATTCCTGGACGCC | |
| | TACGCTGAGCATAAGCTGCAATTTTGGGCCGTTACAGCCGAGAACGAGCCTTCTGC | |
| | CGGCCTGCTGTCTGGATATCCTTTCCAGTGCCTGGGCTTCACCCCTGAGCACCAGA | |
| | GAGACTTTATCGCCAGAGATCTGGGGCCTACCCTGGCTAACAGCACACACCACAAC | |
| | GTGCGGCTGCTGATGCTGGACGATCAGAGGCTGCTGCTCCCCCACTGGGCCAAGGT | |
| | GGTGCTGACAGATCCGGAGGCCGCCAAATACGTGCACGGCATCGCCGTCCACTGGT | |
| | ACCTGGATTTCCTGGCCCCTGCCAAGGCCACCCTGGGCGAGACACATAGACTGTTT | |
| | CCTAATACCATGCTGTTCGCCAGCGAGGCCTGCGTGGGCAGCAAGTTCTGGGAACA | |
| | GAGCGTGCGGCTGGGCAGCTGGGACAGAGGAATGCAGTACAGCCACAGCATCATTA | |
| | CCAACCTGCTGTACCACGTGGTGGGCTGGACCGACTGGAACCTGGCCCTGAACCCC | |
| | GAAGGCGGCCCCAACTGGGTGCGGAACTTCGTGGACTCTCCTATCATCGTGGATAT | |
| | TACCAAGGATACCTTTTACAAGCAGCCTATGTTCTACCACCTGGGCCACTTCAGCA | |
| | AGTTCATCCCTGAGGGCTCTCAGCGGGTGGGCCTGGTGGCCTCTCAGAAAAACGAC | |
| | CTGGATGCCGTTGCCCTGATGCACCCCGACGGCAGCGCCGTGGTGGTCGTCCTGAA | |
| | TAGAAGCTCCAAGGACGTGCCTCTGACCATCAAGGACCCCGCTGTGGGATTTCTGG | |
| | AAACCATCAGCCCTGGCTACAGCATCCACACCTACCTGTGGCGGCGGCAGGGAGGG | |
| | GGGGGTTCGGGTGGCGGCGGAAGTGGGGGCGGTGGTTCTtatggcaggaaaaagcg | |
| | gaggcaaaggcgccgccccccccagTAGTAACTCGAGGACGGGGTGAACTACGCCT | |
| | GAGGATCCgatctttttccctctgccaaaaattatggggacatcatgaagcccctt | |
| | gagcatctgacttctggctaataaaggaaatttattttcattgcaatagtgtgttg | |
| | gaattttttgtgtctctcactcgGCCTAGGTAGATAAGTAGCATGGCGGGTTAATC | |
| | ATTAACTACAaggaacccctagtgatggagttggccactccctctctgcgcgctcg | |
| | ctcgctcactgaggccgggcgaccaaaggtcgcccgacgcccgggctttgcccggg | |
| | cggcctcagtgagcgagcgagcgcgcag | |
| GBA_VG33 | ctgcgcgctcgctcgctcactgaggccgcccgggcaaagcccgggcgtcgggcgac | 1828 |
| | ctttggtcgcccggcctcagtgagcgagcgagcgcgcagagagggagtggccaact | |
| | ccatcactaggggttcctTGTAGTTAATGATTAACCCGCCATGCTACTTATCTACC | |
| | AGGGTAATGGGGATCCTCTAGAACTATAGCTAGTCGACATTGATTATTGACTAGTT | |
| | ATTAATAGTAATCAATTACGGGGTCATTAGTTCATAGCCCATATATGGAGTTCCGC | |
| | GTTACATAACTTACGGTAAATGGCCCGCCTGGCTGACCGCCCAACGACCCCCGCCC | |
| | ATTGACGTCAATAATGACGTATGTTCCCATAGTAACGCCAATAGGGACTTTCCATT | |
| | GACGTCAATGGGTGGAGTATTTACGGTAAACTGCCCACTTGGCAGTACATCAAGTG | |
| | TATCATATGCCAAGTACGCCCCCTATTGACGTCAATGACGGTAAATGGCCCGCCTG | |
| | GCATTATGCCCAGTACATGACCTTATGGGACTTTCCTACTTGGCAGTACATCTACG | |
| | TATTAGTCATCGCTATTACCATGTCGAGGccacgttctgcttcactctccccatct | |
| | cccccccctccccacccccaattttgtatttatttattttttaattattttgtgca | |
| | gcgatgggggcggggggggggggcgcgcgccaggcggggcggggcggggcgagggg | |
| | cggggcggggcgaggcggagaggtgcggcggcagccaatcagagcggcgcgctccg | |
| | aaagtttccttttatggcgaggcggcggcggcggcggccctataaaaagcgaagcg | |
| | cgcggcgggCGGGAGCAAGCTTCGTTTAGTGAACCGtcagatcgcctggagacgcc | |
| | atccacgctgttttgacctccatagaagacaccgggaccgatccagcctccgcgga | |
| | ttcgaatcccggccgggaacggtgcattggaacgcggattccccgtgccaagagtg | |
| | acgtaagtaccgcctatagagtctataggcccacaaaaaatgctttcttcttttaa | |
| | tatacttttttgtttatcttatttctaatactttccctaatctctttctttcaggg | |
| | caataatgatacaatgtatcatgcctctttgcaccattctaaagaataacagtgat | |
| | aatttctgggttaaggcaatagcaatatttctgcatataaatatttctgcatataa | |
| | attgtaactgatgtaagaggtttcatattgctaatagcagctacaatccagctacc | |
| | attctgcttttattttatggttgggataaggctggattattctgagtccaagctag | |
| | gcccttttgctaatcatgttcatacctcttatcttcctcccacagctcctgggcaa | |
| | cgtgctggtctgtgtgctggcccatcactttggcaaagaattGGGATTCGAACCGG | |
| | TGCCGCCACCATGGAATTCTCTAGCCCATCTAGAGAGGAATGTCCTAAGCCTCTGT | |
| | CAAGAGTGTCCATCATGGCCGGCAGCCTGACAGGCCTGCTGCTGCTGCAGGCCGTG | |
| | TCCTGGGCCAGTGGAGCCCGGCCCTGCATCCCTAAGTCCTTCGGCTATTCTAGCGT | |
| | GGTCTGCGTGTGTAATGCCACTTACTGCGACAGCTTCGACCCTCCTACCTTCCCCG | |
| | CCCTTGGAACATTCAGCAGATACGAGAGCACCAGAAGCGGCAGAAGAATGGAACTG | |
| | AGCATGGGCCCAATCCAGGCCAACCACACCGGCACCGGCCTGCTGCTGACACTGCA | |
| | ACCTGAGCAGAAGTTCCAGAAGGTGAAGGGATTTGGAGGCGCCATGACCGACGCTG | |
| | CTGCTCTGAACATCCTGGCCCTCTCCCCACCTGCTCAGAACCTGCTGCTTAAAAGC | |
| | TACTTCAGCGAGGAAGGCATCGGCTATAACATCATCAGAGTGCCCATGGCCAGCTG | |
| | CGACTTCAGCATCAGAACATACACCTACGCCGATACACCTGATGACTTCCAACTGC | |
| | ACAACTTCAGCCTGCCTGAAGAGGACACAAAGCTGAAAATCCCCCTGATCCACCGG | |
| | GCCCTGCAGCTGGCCCAGAGACCTGTGAGCCTGCTGGCCTCTCCTTGGACAAGCCC | |
| | CACCTGGCTGAAGACCAATGGAGCTGTGAACGGCAAGGGCAGCCTGAAGGGCCAGC | |
| | CCGGCGACATCTACCACCAAACCTGGGCTCGCTACTTCGTGAAATTCCTGGACGCC | |
| | TACGCTGAGCATAAGCTGCAATTTTGGGCCGTTACAGCCGAGAACGAGCCTTCTGC | |
| | CGGCCTGCTGTCTGGATATCCTTTCCAGTGCCTGGGCTTCACCCCTGAGCACCAGA | |
| | GAGACTTTATCGCCAGAGATCTGGGGCCTACCCTGGCTAACAGCACACACCACAAC | |
| | GTGCGGCTGCTGATGCTGGACGATCAGAGGCTGCTGCTCCCCCACTGGGCCAAGGT | |
| | GGTGCTGACAGATCCGGAGGCCGCCAAATACGTGCACGGCATCGCCGTCCACTGGT | |
| | ACCTGGATTTCCTGGCCCCTGCCAAGGCCACCCTGGGCGAGACACATAGACTGTTT | |
| | CCTAATACCATGCTGTTCGCCAGCGAGGCCTGCGTGGGCAGCAAGTTCTGGGAACA | |
| | GAGCGTGCGGCTGGGCAGCTGGGACAGAGGAATGCAGTACAGCCACAGCATCATTA | |
| | CCAACCTGCTGTACCACGTGGTGGGCTGGACCGACTGGAACCTGGCCCTGAACCCC | |
| | GAAGGCGGCCCCAACTGGGTGCGGAACTTCGTGGACTCTCCTATCATCGTGGATAT | |
| | TACCAAGGATACCTTTTACAAGCAGCCTATGTTCTACCACCTGGGCCACTTCAGCA | |
| | AGTTCATCCCTGAGGGCTCTCAGCGGGTGGGCCTGGTGGCCTCTCAGAAAAACGAC | |
| | CTGGATGCCGTTGCCCTGATGCACCCCGACGGCAGCGCCGTGGTGGTCGTCCTGAA | |
| | TAGAAGCTCCAAGGACGTGCCTCTGACCATCAAGGACCCCGCTGTGGGATTTCTGG | |
| | AAACCATCAGCCCTGGCTACAGCATCCACACCTACCTGTGGCGGCGGCAGTAGTAA | |
| | CCTCGAGGTACCAGGAGCTCTTCTCCTAGTGAATTCTACCAGTGCCATAGATAGTT | |
| | AAGTGAATTCTACCAGTGCCATAGATAGTTAAGTGAATTCTACCAGTGCCATAGAT | |
| | AGTTAAGTGAATTCTACCAGTGCCATACTGCAGTCAGGTCTATACCATCGAGGACG | |
| | GGGTGAACTACGCCTGAGGATCCgatctttttccctctgccaaaaattatggggac | |
| | atcatgaagccccttgagcatctgacttctggctaataaaggaaatttattttcat | |
| | tgcaatagtgtgttggaattttttgtgtctctcactcgGCCTAGGTAGATAAGTAG | |
| | CATGGCGGGTTAATCATTAACTACAaggaacccctagtgatggagttggccactcc | |
| | ctctctgcgcgctcgctcgctcactgaggccgggcgaccaaaggtcgcccgacgcc | |
| | cgggctttgcccgggcggcctcagtgagcgagcgagcgcgcag | |

[0692] In some embodiments, the viral genome of an AAV particle described herein comprises a nucleotide sequence comprising the all of the components or a combination of the components as described, e.g., in Tables 20, 21, or 29-32, or a sequence having at least 70%, 75%, 80%, 85%, 90%, 95%, or 99% sequence identity to any of the aforesaid sequences.

TABLE 20
Sequence Regions in ITR to ITR Sequences

GBA_VG17 (SEQ ID NO: 1812)

| | Region SEQ | Region | Position in SEQ |
|---|---|---|---|
| Sequence Regions | ID NO | length | ID NO: 1812 |
| 5′ ITR | 1829 | 130 | 1-130 |
| CMVie | 1831 | 380 | 204-583 |
| CB promoter | 1834 | 260 | 590-849 |
| Intron | 1842 | 566 | 877-1442 |
| Signal sequence | 1850 | 117 | 1467-1583 |
| GBA Variant 1 | 1773 | 1,491 | 1584-3074 |
| coding sequence | | | |
| PolyA | 1846 | 127 | 3114-3240 |
| 3′ ITR | 1830 | 130 | 3284-3413 |

[0693] In some embodiments the AAV particle comprises a viral genome comprising the nucleotide sequence of SEQ ID NO: 1812 (GBA_VG17), or a nucleotide sequence substantially identical (e.g., having at least 70%, 75%, 80%, 85%, 90%, 95%, 99% or 100%, sequence identity) thereto. In some embodiments, the viral genome comprises the nucleotide sequence of SEQ ID NO: 1812, or a sequence substantially identical (e.g., having at least 70%, 75%, 80%, 85%, 90%, 95%, or 99% sequence identity) thereto. In some embodiments, the viral genome comprising the nucleotide sequence of SEQ ID NO: 1812, comprises in 5′ to 3′ order: a 5′ ITR sequence region comprising the nucleotide sequence of SEQ ID NO: 1829, or a nucleotide sequence at least 95% identical thereto; a CMVie enhancer comprising the nucleotide sequence of SEQ ID NO: 1831, or a nucleotide sequence at least 95% identical thereto; a CB promoter comprising the nucleotide sequence of SEQ ID NO: 1834, or a nucleotide sequence at least 95% identical thereto; an intron comprising the nucleotide sequence of SEQ ID NO: 1842, or a nucleotide sequence at least 95% identical thereto; a nucleotide sequence encoding a signal sequence comprising the nucleotide sequence of SEQ ID NO: 1850, or a nucleotide sequence at least 95% identical thereto; a nucleotide sequence encoding a GBA protein comprising the nucleotide sequence of SEQ ID NO: 1773 or a nucleotide sequence at least 88% (e.g., at least 89, 90, 92, 95, 96, 97, 98, or 99%) identical to the nucleotide sequence of SEQ ID NO: 1773; a polyadenylation sequence comprising the nucleotide sequence of SEQ ID NO: 1846, or a nucleotide sequence at least 95% identical thereto; and a 3′ ITR sequence region comprising the nucleotide sequence of SEQ ID NO: 1830, or a nucleotide sequence at least 95% identical thereto.

[0694] In some embodiments, the viral genome comprising the nucleotide sequence of SEQ ID NO: 1812, or a nucleotide sequence substantially identical (e.g., having at least 70%, 75%, 80%, 85%, 90%, 95%, or 99% sequence identity) thereto, encodes a GBA protein comprising the amino acid sequence of SEQ ID NO: 1775, or an amino acid sequence substantially identical (e.g., having at least 70%, 75%, 80%, 85%, 90%, 95%, or 99% sequence identity) thereto.

TABLE 29
Sequence Regions in ITR to ITR Sequences

| | GBA_VG18 (SEQ ID NO: 1813) | | |
|---|---|---|---|
| | Region SEQ | Region | Position in SEQ |
| Sequence Regions | ID NO | length | ID NO: 1813 |
| 5′ ITR | 1829 | 130 | 1-130 |
| EF-1α promoter variant 2 | 1839 | 1189 | 216-1404 |
| Signal sequence | 1850 | 117 | 1429-1545 |
| GBA Variant 1 coding | 1773 | 1,491 | 1546-3063 |
| sequence | | | |
| PolyA | 1846 | 127 | 3076-3202 |
| 3′ ITR | 1830 | 130 | 3246-3375 |

[0695] In some embodiments the AAV particle comprises a viral genome comprising the nucleotide sequence of SEQ ID NO: 1813 (GBA_VG18), or a nucleotide sequence substantially identical (e.g., having at least 70%, 75%, 80%, 85%, 90%, 95%, 99% or 100%, sequence identity) thereto. In some embodiments, the viral genome comprises the nucleotide sequence of SEQ ID NO: 1813, or a sequence substantially identical (e.g., having at least 70%, 75%, 80%, 85%, 90%, 95%, or 99% sequence identity) thereto. In some embodiments, the viral genome comprising the nucleotide sequence of SEQ ID NO: 1813, comprises in 5′ to 3′ order: a 5′ ITR sequence region comprising the nucleotide sequence of SEQ ID NO: 1829, or a nucleotide sequence at least 95% identical thereto; an EF-1α promoter variant comprising the nucleotide sequence of SEQ ID NO: 1839, or a nucleotide sequence at least 95% identical thereto; a nucleotide sequence encoding a signal sequence comprising the nucleotide sequence of SEQ ID NO: 1850, or a nucleotide sequence at least 95% identical thereto; a nucleotide sequence encoding a GBA protein comprising the nucleotide sequence of SEQ ID NO: 1773 or a nucleotide sequence at least 88% (e.g., at least 89, 90, 92, 95, 96, 97, 98, or 99%) identical to the nucleotide sequence of SEQ ID NO: 1773; a polyadenylation sequence comprising the nucleotide sequence of SEQ ID NO: 1846, or a nucleotide sequence at least 95% identical thereto; and a 3′ ITR sequence region comprising the nucleotide sequence of SEQ ID NO: 1830, or a nucleotide sequence at least 95% identical thereto.

[0696] In some embodiments, the viral genome comprising the nucleotide sequence of SEQ ID NO: 1813, or a nucleotide sequence substantially identical (e.g., having at least 70%, 75%, 80%, 85%, 90%, 95%, or 99% sequence identity) thereto, encodes a GBA protein comprising the amino acid sequence of SEQ ID NO: 1775, or an amino acid sequence substantially identical (e.g., having at least 70%, 75%, 80%, 85%, 90%, 95%, or 99% sequence identity) thereto.

TABLE 30
Sequence Regions in ITR to ITR Sequences

| | GBA_VG27 (SEQ ID NO: 1822) | | |
|---|---|---|---|
| | Region SEQ | Region | Position in SEQ |
| Sequence Regions | ID NO | length | ID NO: 1822 |
| 5′ ITR | 1829 | 130 | 1-130 |
| CMVie | 1831 | 380 | 204-583 |
| CB promoter | 1834 | 260 | 590-849 |
| Intron | 1842 | 566 | 877-1442 |
| Signal sequence | 1850 | 117 | 1467-1583 |
| GBA Variant 1 coding | 1773 | 1,491 | 1584-3074 |
| sequence | | | |
| Furin cleavage site | 1724 | 12 | 3075-3086 |
| T2A | 1726 | 54 | 3087-3140 |
| Signal sequence | 1856 | 48 | 3141-3188 |
| SAPC coding sequence | 1787 | 351 | 3189-3539 |
| PolyA | 1846 | 127 | 3579-3705 |
| 3′ ITR | 1830 | 130 | 3749-3878 |

[0697] In some embodiments the AAV particle comprises a viral genome comprising the nucleotide sequence of SEQ ID NO: 1822 (GBA_VG27), or a nucleotide sequence substantially identical (e.g., having at least 70%, 75%, 80%, 85%, 90%, 95%, 99% or 100%, sequence identity) thereto. In some embodiments, the viral genome comprises the nucleotide sequence of SEQ ID NO: 1822, or a sequence substantially identical (e.g., having at least 70%, 75%, 80%, 85%, 90%, 95%, or 99% sequence identity) thereto. In some embodiments, the viral genome comprising the nucleotide sequence of SEQ ID NO: 1822, comprises in 5′ to 3′ order: a 5′ ITR sequence region comprising the nucleotide sequence of SEQ ID NO: 1829, or a nucleotide sequence at least 95% identical thereto; a CMVie enhancer comprising the nucleotide sequence of SEQ ID NO: 1831, or a nucleotide sequence at least 95% identical thereto; a CB promoter comprising the nucleotide sequence of SEQ ID NO: 1834, or a nucleotide sequence at least 95% identical thereto; an intron comprising the nucleotide sequence of SEQ ID NO: 1842, or a nucleotide sequence at least 95% identical thereto; a nucleotide sequence encoding a first signal sequence comprising the nucleotide sequence of SEQ ID NO: 1850, or a nucleotide sequence at least 95% identical thereto; a nucleotide sequence encoding a GBA protein comprising the nucleotide sequence of SEQ ID NO: 1773 or a nucleotide sequence at least 88% (e.g., at least 89, 90, 92, 95, 96, 97, 98, or 99%) identical to the nucleotide sequence of SEQ ID NO: 1773; a nucleotide sequence encoding a furin cleavage site comprising the nucleotide sequence of SEQ ID NO: 1724, or a nucleotide sequence having at least one, two, or three but no more than four modifications, e.g., substitutions, relative to SEQ ID NO: 1724; a nucleotide sequence encoding a T2A polypeptide comprising the nucleotide sequence of SEQ ID NO: 1726, or a nucleotide sequence having at least one, two, or three but no more than four modifications, e.g., substitutions, relative to SEQ ID NO: 1726; a nucleotide sequence encoding a second signal sequence comprising the nucleotide sequence of SEQ ID NO: 1856, or a nucleotide sequence at least 85% (e.g., at least 90%, 92%, 95%, 97%, 98%, or 99%) identical thereto; a nucleotide sequence encoding a SAPC polypeptide comprising the nucleotide sequence of SEQ ID NO: 1787, or a nucleotide sequence at least 85% (e.g., at least 90%, 92%, 95%, 97%, 98%, or 99%) identical thereto; a polyadenylation sequence comprising the nucleotide sequence of SEQ ID NO: 1846, or a nucleotide sequence at least 95% identical thereto; and a 3′ ITR sequence region comprising the nucleotide sequence of SEQ ID NO: 1830, or a nucleotide sequence at least 95% identical thereto.

[0698] In some embodiments, the viral genome comprising the nucleotide sequence of SEQ ID NO: 1822, or a nucleotide sequence substantially identical (e.g., having at least 70%, 75%, 80%, 85%, 90%, 95%, or 99% sequence identity) thereto, encodes a GBA protein comprising the amino acid sequence of SEQ ID NO: 1775, or an amino acid sequence substantially identical (e.g., having at least 70%, 75%, 80%, 85%, 90%, 95%, or 99% sequence identity) thereto. In some embodiments, the viral genome comprising the nucleotide sequence of SEQ ID NO: 1822, or a nucleotide sequence substantially identical (e.g., having at least 70%, 75%, 80%, 85%, 90%, 95%, or 99% sequence identity) thereto, encodes a SAPC protein comprising the amino acid sequence of SEQ ID NO: 1789, or an amino acid sequence at least 85% (e.g., at least 90%, 92%, 95%, 96%, 97%, 98%, or 99%) identical thereto.

TABLE 31
Sequence Regions in ITR to ITR Sequences

| | GBA_VG29 (SEQ ID NO: 1824) | | |
|---|---|---|---|
| | Region SEQ | Region | Position in SEQ |
| Sequence Regions | ID NO | length | ID NO: 1824 |
| 5′ ITR | 1829 | 130 | 1-130 |
| CMVie | 1831 | 380 | 204-583 |
| CB promoter | 1834 | 260 | 590-849 |
| Intron | 1842 | 566 | 877-1442 |
| Signal sequence | 1850 | 117 | 1467-1583 |
| Lysosomal targeting | 1801 | 63 | 1584-1646 |
| sequence 2 (LTS2) | | | |
| GBA Variant 1 coding | 1773 | 1,491 | 1647-3137 |
| sequence | | | |
| PolyA | 1846 | 127 | 3177-3303 |
| 3′ ITR | 1830 | 130 | 3347-3476 |

[0699] In some embodiments the AAV particle comprises a viral genome comprising the nucleotide sequence of SEQ ID NO: 1824 (GBA_VG29), or a nucleotide sequence substantially identical (e.g., having at least 70%, 75%, 80%, 85%, 90%, 95%, 99% or 100%, sequence identity) thereto. In some embodiments, the viral genome comprises the nucleotide sequence of SEQ ID NO: 1824, or a sequence substantially identical (e.g., having at least 70%, 75%, 80%, 85%, 90%, 95%, or 99% sequence identity) thereto. In some embodiments, the viral genome comprising the nucleotide sequence of SEQ ID NO: 1824, comprises in 5′ to 3′ order: a 5′ ITR sequence region comprising the nucleotide sequence of SEQ ID NO: 1829, or a nucleotide sequence at least 95% identical thereto; a CMVie enhancer comprising the nucleotide sequence of SEQ ID NO: 1831, or a nucleotide sequence at least 95% identical thereto; a CB promoter comprising the nucleotide sequence of SEQ ID NO: 1834, or a nucleotide sequence at least 95% identical thereto; an intron comprising the nucleotide sequence of SEQ ID NO: 1842, or a nucleotide sequence at least 95% identical thereto; a nucleotide sequence encoding a signal sequence comprising the nucleotide sequence of SEQ ID NO: 1850, or a nucleotide sequence at least 95% identical thereto; a lysosomal targeting sequence 2 (LTS2) comprising the nucleotide sequence of SEQ ID NO: 1801, or a nucleotide sequence at least 85% (e.g., at least 90%, 92%, 95%, 96%, 97%, 98%, or 99%) identical thereto; a nucleotide sequence encoding a GBA protein comprising the nucleotide sequence of SEQ ID NO: 1773 or a nucleotide sequence at least 88% (e.g., at least 89, 90, 92, 95, 96, 97, 98, or 99%) identical to the nucleotide sequence of SEQ ID NO: 1773; a polyadenylation sequence comprising the nucleotide sequence of SEQ ID NO: 1846, or a nucleotide sequence at least 95% identical thereto; and a 3′ ITR sequence region comprising the nucleotide sequence of SEQ ID NO: 1830, or a nucleotide sequence at least 95% identical thereto.

[0700] In some embodiments, the viral genome comprising the nucleotide sequence of SEQ ID NO: 1824, or a nucleotide sequence substantially identical (e.g., having at least 70%, 75%, 80%, 85%, 90%, 95%, or 99% sequence identity) thereto, encodes a GBA protein comprising the amino acid sequence of SEQ ID NO: 1775, or an amino acid sequence substantially identical (e.g., having at least 70%, 75%, 80%, 85%, 90%, 95%, or 99% sequence identity) thereto.

TABLE 32
Sequence Regions in ITR to ITR Sequences

| | GBA_VG32 (SEQ ID NO: 1827) | | |
|---|---|---|---|
| | Region SEQ | Region | Position in SEQ |
| Sequence Regions | ID NO | length | ID NO: 1827 |
| 5′ ITR | 1829 | 130 | 1-130 |
| CMVie | 1831 | 380 | 204-583 |
| CB promoter | 1834 | 260 | 590-849 |
| Intron | 1842 | 566 | 877-1442 |
| Signal sequence | 1850 | 117 | 1467-1583 |
| GBA Variant 1 coding | 1773 | 1,491 | 1584-3074 |
| sequence | | | |
| G4S3 linker | 1730 | 45 | 3075-3119 |
| TAT coding sequence | 1793 | 42 | 3120-3161 |
| PolyA | 1846 | 127 | 3201-3327 |
| 3′ ITR | 1830 | 130 | 3371-3500 |

[0701] In some embodiments the AAV particle comprises a viral genome comprising the nucleotide sequence of SEQ ID NO: 1827 (GBA_VG32), or a nucleotide sequence substantially identical (e.g., having at least 70%, 75%, 80%, 85%, 90%, 95%, 99% or 100%, sequence identity) thereto. In some embodiments, the viral genome comprises the nucleotide sequence of SEQ ID NO: 1827, or a sequence substantially identical (e.g., having at least 70%, 75%, 80%, 85%, 90%, 95%, or 99% sequence identity) thereto. In some embodiments, the viral genome comprising the nucleotide sequence of SEQ ID NO: 1827, comprises in 5′ to 3′ order: a 5′ ITR sequence region comprising the nucleotide sequence of SEQ ID NO: 1829, or a nucleotide sequence at least 95% identical thereto; a CMVie enhancer comprising the nucleotide sequence of SEQ ID NO: 1831, or a nucleotide sequence at least 95% identical thereto; a CB promoter comprising the nucleotide sequence of SEQ ID NO: 1834, or a nucleotide sequence at least 95% identical thereto; an intron comprising the nucleotide sequence of SEQ ID NO: 1842, or a nucleotide sequence at least 95% identical thereto; a nucleotide sequence encoding a signal sequence comprising the nucleotide sequence of SEQ ID NO: 1850, or a nucleotide sequence at least 95% identical thereto; a nucleotide sequence encoding a GBA protein comprising the nucleotide sequence of SEQ ID NO: 1773 or a nucleotide sequence at least 88% (e.g., at least 89, 90, 92, 95, 96, 97, 98, or 99%) identical to the nucleotide sequence of SEQ ID NO: 1773; a nucleotide sequence encoding a G4S3 linker comprising the nucleotide sequence of SEQ ID NO: 1730, or a nucleotide sequence at least 85% (e.g., at least 90%, 92%, 95%, 96%, 97%, 98%, or 99%) identical thereto; a nucleotide sequence encoding a TAT peptide comprising the nucleotide sequence of SEQ ID NO: 1793, or a nucleotide sequence at least 85% (e.g., at least 90%, 92%, 95%, 96%, 97%, 98%, or 99%) identical thereto; a polyadenylation sequence comprising the nucleotide sequence of SEQ ID NO: 1846, or a nucleotide sequence at least 95% identical thereto; and a 3′ ITR sequence region comprising the nucleotide sequence of SEQ ID NO: 1830, or a nucleotide sequence at least 95% identical thereto.

[0702] In some embodiments, the viral genome comprising the nucleotide sequence of SEQ ID NO: 1827, or a nucleotide sequence substantially identical (e.g., having at least 70%, 75%, 80%, 85%, 90%, 95%, or 99% sequence identity) thereto, encodes a GBA protein comprising the amino acid sequence of SEQ ID NO: 1775, or an amino acid sequence substantially identical (e.g., having at least 70%, 75%, 80%, 85%, 90%, 95%, or 99% sequence identity) thereto. In some embodiments, the viral genome comprising the nucleotide sequence of SEQ ID NO: 1827, or a nucleotide sequence substantially identical (e.g., having at least 70%, 75%, 80%, 85%, 90%, 95%, or 99% sequence identity) thereto, encodes a TAT peptide comprising the amino acid sequence of SEQ ID NO: 1794, or an amino acid sequence having at least one, two, or three but no more than four modifications, e.g., substitutions, relative to SEQ ID NO: 1794.

TABLE 21
Sequence Regions in ITR to ITR Sequences

| | GBA_VG33 (SEQ ID NO: 1828) | | |
|---|---|---|---|
| | Region SEQ | Region | Position in SEQ |
| Sequence Regions | ID NO | length | ID NO: 1828 |
| 5′ ITR | 1829 | 130 | 1-130 |
| CMVie | 1831 | 380 | 204-583 |
| CB promoter | 1834 | 260 | 590-849 |
| Intron | 1842 | 566 | 877-1442 |
| Signal sequence | 1850 | 117 | 1467-1583 |
| GBA Variant 1 coding | 1773 | 1,491 | 1584-3074 |
| sequence | | | |
| miR183 binding site | 1847 | 22 | 3108-3129 |
| Spacer | 1848 | 8 | 3130-3137 |
| miR183 binding site | 1847 | 22 | 3138-3159 |
| Spacer | 1848 | 8 | 3160-3167 |
| miR183 binding site | 1847 | 22 | 3168-3189 |
| Spacer | 1848 | 8 | 3190-3197 |
| miR183 binding site | 1847 | 22 | 3198-3219 |
| PolyA | 1846 | 127 | 3272-3398 |
| 3′ ITR | 1830 | 130 | 3442-3751 |

[0703] In some embodiments, the AAV particle comprises a viral genome comprising the nucleotide sequence of SEQ ID NO: 1828 (GBA_VG33), or a nucleotide sequence substantially identical (e.g., having at least 70%, 75%, 80%, 85%, 90%, 95%, 99% or 100%, sequence identity) thereto. In some embodiments, the viral genome comprises the nucleotide sequence of SEQ ID NO: 1828, or a sequence substantially identical (e.g., having at least 70%, 75%, 80%, 85%, 90%, 95%, or 99% sequence identity) thereto. In some embodiments, the viral genome comprising the nucleotide sequence of SEQ ID NO: 1828, comprises in 5′ to 3′ order: a 5′ ITR sequence region comprising the nucleotide sequence of SEQ ID NO: 1829, or a nucleotide sequence at least 95% identical thereto; a CMVie enhancer comprising the nucleotide sequence of SEQ ID NO: 1831, or a nucleotide sequence at least 95% identical thereto; a CB promoter comprising the nucleotide sequence of SEQ ID NO: 1834, or a nucleotide sequence at least 95% identical thereto; an intron comprising the nucleotide sequence of SEQ ID NO: 1842, or a nucleotide sequence at least 95% identical thereto; a nucleotide sequence encoding a signal sequence comprising the nucleotide sequence of SEQ ID NO: 1850, or a nucleotide sequence at least 95% identical thereto; a nucleotide sequence encoding a GBA protein comprising the nucleotide sequence of SEQ ID NO: 1773 or a nucleotide sequence at least 88% (e.g., at least 89, 90, 92, 95, 96, 97, 98, or 99%) identical to the nucleotide sequence of SEQ ID NO: 1773; a nucleotide sequence encoding a miR183 binding site comprising the nucleotide sequence of SEQ ID NO: 1847, or a nucleotide sequence having at least one, two, three, four, five, six, or seven modifications, but no more than ten modifications of SEQ ID NO: 1847; a spacer comprising the nucleotide sequence of SEQ ID NO: 1848, or a nucleotide sequence having at least one, two, or three modifications, but no more than four modifications of SEQ ID NO: 1848; a nucleotide sequence encoding a miR183 binding site comprising the nucleotide sequence of SEQ ID NO: 1847, or a nucleotide sequence having at least one, two, three, four, five, six, or seven modifications, but no more than ten modifications of SEQ ID NO: 1847; a spacer comprising the nucleotide sequence of SEQ ID NO: 1848, or a nucleotide sequence having at least one, two, or three modifications, but no more than four modifications of SEQ ID NO: 1848; a nucleotide sequence encoding a miR183 binding site comprising the nucleotide sequence of SEQ ID NO: 1847, or a nucleotide sequence having at least one, two, three, four, five, six, or seven modifications, but no more than ten modifications of SEQ ID NO: 1847; a spacer comprising the nucleotide sequence of SEQ ID NO: 1848, or a nucleotide sequence having at least one, two, or three modifications, but no more than four modifications of SEQ ID NO: 1848; a nucleotide sequence encoding a miR183 binding site comprising the nucleotide sequence of SEQ ID NO: 1847, or a nucleotide sequence having at least one, two, three, four, five, six, or seven modifications, but no more than ten modifications of SEQ ID NO: 1847; a polyadenylation sequence comprising the nucleotide sequence of SEQ ID NO: 1846, or a nucleotide sequence at least 95% identical thereto; and a 3′ ITR sequence region comprising the nucleotide sequence of SEQ ID NO: 1830, or a nucleotide sequence at least 95% identical thereto.

[0704] In some embodiments, the viral genome comprising the nucleotide sequence of SEQ ID NO: 1828, or a nucleotide sequence substantially identical (e.g., having at least 70%, 75%, 80%, 85%, 90%, 95%, or 99% sequence identity) thereto, encodes a GBA protein comprising the amino acid sequence of SEQ ID NO: 1775, or an amino acid sequence substantially identical (e.g., having at least 70%, 75%, 80%, 85%, 90%, 95%, or 99% sequence identity) thereto.

[0705] In some embodiments, the AAV particle comprises an AAV viral genome comprising the nucleotide sequence of any of the viral genomes described herein, e.g., as described in Tables 18-21 or 29-32, or a nucleotide sequence substantially identical (e.g., having at least about 70%, 75%, 80%, 85%, 90%, 92%, 95%, 97%, 98%, or 99% sequence identity) to any of the aforesaid sequences. In some embodiments, the AAV viral genome further comprises a nucleic acid encoding a capsid protein, e.g., a structural protein. In some embodiments, the capsid protein comprises a VP1 polypeptide, a VP2 polypeptide, and/or a VP3 polypeptide. In some embodiments, the VP1 polypeptide, the VP2 polypeptide, and/or the VP3 polypeptide are encoded by at least one Cap gene. In some embodiments, the AAV viral genome further comprises a nucleic acid encoding a Rep protein, e.g., a non-structural protein. In some embodiments, the Rep protein comprises a Rep78 protein, a Rep68, Rep52 protein, and/or a Rep40 protein. In some embodiments, the Rep78 protein, the Rep68 protein, the Rep52 protein, and/or the Rep40 protein are encoded by at least one Rep gene.

[0706] In some embodiment, the AAV particle comprising a viral comprising the nucleotide sequence of any of the viral genomes described herein, e.g., as described in Tables 18-21 or 29-32, or a nucleotide sequence substantially identical (e.g., having at least about 70%, 75%, 80%, 85%, 90%, 92%, 95%, 97%, 98%, or 99% sequence identity) to any of the aforesaid sequences comprises, e.g., is packaged in, a capsid protein having a serotype or a functional variant thereof selected from Table 1. In some embodiments, the capsid protein comprise a VOY101, VOY201, AAVPHP.N (PHP.N), AAVPHP.B (PHP.B), AAVPHP.A (PHP.A), PHP.B2, PHP.B3, G2B4, G2B5, AAV9, AAVrh10, or a functional variant thereof. In some embodiments, the capsid protein comprises a VOY101 capsid protein, or functional variant thereof.

[0707] In some embodiments, the AAV particle comprising a viral genome comprising the nucleotide sequence of any of the viral genomes described herein, e.g., as described in Tables 18-21 or 29-32, or a nucleotide sequence substantially identical (e.g., having at least about 70%, 75%, 80%, 85%, 90%, 92%, 95%, 97%, 98%, or 99% sequence identity) to any of the aforesaid sequences comprises a capsid protein comprising the amino acid sequence of SEQ ID NO: 138, or a sequence substantially identical (e.g., having at least about 70%, 75%, 80%, 85%, 90%, 92%, 95%, 97%, 98%, or 99% sequence identity) thereto. In some embodiments, the capsid protein comprises an amino acid sequence having at least one, two or three modifications, but not more than 30, 20 or 10 modifications of the amino acid sequence of SEQ ID NO: 138. In some embodiments, the capsid protein is encoded by the nucleotide sequence of SEQ ID NO: 137, or a nucleotide sequence substantially identical (e.g., having at least 70%, 75%, 80%, 85%, 90%, 95% or 99%) thereto. In some embodiments, the capsid protein comprises an amino acid substitution at position K449, e.g., a K449R substitution, numbered according to SEQ ID NO:138. In some embodiments, the capsid protein comprises an insert comprising the amino acid sequence of TLAVPFK (SEQ ID NO: 1262), wherein the insert is present immediately subsequent to position 588, relative to a reference sequence numbered according to SEQ ID NO:138. In some embodiments, the capsid protein comprises an amino acid other than “A” at position 587 and/or an amino acid other than “Q” at position 588, numbered according to SEQ ID NO:138. In some embodiments, the capsid protein comprises the amino acid substitution of A587D and/or Q588G, numbered according to SEQ ID NO:138.

[0708] In some embodiments, the AAV particle comprising a viral genome comprising the nucleotide sequence of any of the viral genomes described herein, e.g., as described in Tables 18-21 or 29-32, or a nucleotide sequence substantially identical (e.g., having at least about 70%, 75%, 80%, 85%, 90%, 92%, 95%, 97%, 98%, or 99% sequence identity) to any of the aforesaid sequences comprises a capsid protein comprising the amino acid sequence of SEQ ID NO: 1, or a sequence substantially identical (e.g., having at least about 70%, 75%, 80%, 85%, 90%, 92%, 95%, 97%, 98%, or 99% sequence identity) thereto. In some embodiments, the capsid protein comprises an amino acid sequence having at least one, two or three modifications, but not more than 30, 20 or 10 modifications of the amino acid sequence of SEQ ID NO: 1. In some embodiments, the capsid protein is encoded by the nucleotide sequence of SEQ ID NO: 2, or a nucleotide sequence substantially identical (e.g., having at least 70%, 75%, 80%, 85%, 90%, 95% or 99%) thereto.

[0709] The present disclosure provides in some embodiments, vectors, cells, and/or AAV particles comprising the above identified viral genomes.

### Self-Complementary and Single Strand Vectors

[0710] In some embodiments, the AAV vector used in the present disclosure is a single strand vector (ssAAV).

[0711] In some embodiments, the AAV vectors may be self-complementary AAV vectors (scAAVs). See, e.g., U.S. Pat. No. 7,465,583. scAAV vectors contain both DNA strands that anneal together to form double stranded DNA. By skipping second strand synthesis, scAAVs allow for rapid expression in the cell.

[0712] In some embodiments, the AAV vector used in the present disclosure is a scAAV.

[0713] Methods for producing and/or modifying AAV vectors are disclosed in the art such as pseudotyped AAV vectors (International Patent Publication Nos. WO200028004; WO200123001; WO2004112727; WO 2005005610 and WO 2005072364, the content of each of which are incorporated herein by reference in their entirety).

### Viral Genome Size

[0714] In some embodiments, the viral genome of the AAV particles of the present disclosure may be single or double stranded. The size of the vector genome may be small, medium, large or the maximum size.

[0715] In some embodiments, the vector genome, which comprises a nucleic acid sequence encoding GCase protein described herein, may be a small single stranded vector genome. A small single stranded vector genome may be about 2.7 kb to about 3.5 kb in size such as about 2.7, about 2.8, about 2.9, about 3.0, about 3.1, about 3.2, about 3.3, about 3.4, or about 3.5 kb in size. In some embodiments, the small single stranded vector genome may be 3.2 kb in size.

[0716] In some embodiments, the vector genome, which comprises a nucleic acid sequence encoding GCase protein described herein, may be a small double stranded vector genome. A small double stranded vector genome may be about 1.3 to about 1.7 kb in size such as about 1.3, about 1.4, about 1.5, about 1.6, or about 1.7 kb in size. In some embodiments, the small double stranded vector genome may be 1.6 kb in size.

[0717] In some embodiments, the vector genome, which comprises a nucleic acid sequence encoding GCase protein described herein, may be a medium single stranded vector genome. A medium single stranded vector genome may be about 3.6 to about 4.3 kb in size such as about 3.6, about 3.7, about 3.8, about 3.9, about 4.0, about 4.1, about 4.2, or about 4.3 kb in size. In some embodiments, the medium single stranded vector genome may be 4.0 kb in size.

[0718] In some embodiments, the vector genome, which comprises a nucleic acid sequence encoding GCase protein described herein, may be a medium double stranded vector genome. A medium double stranded vector genome may be about 1.8 to about 2.1 kb in size such as about 1.8, about 1.9, about 2.0, or about 2.1 kb in size. In some embodiments, the medium double stranded vector genome may be 2.0 kb in size. Additionally, the vector genome may comprise a promoter and a polyA tail.

[0719] In some embodiments, the vector genome which comprises a nucleic acid sequence encoding GCase protein described herein may be a large single stranded vector genome. A large single stranded vector genome may be 4.4 to 6.0 kb in size such as about 4.4, 4.5, 4.6, 4.7, 4.8, 4.9, 5.0, 5.1, 5.2, 5.3, 5.4, 5.5, 5.6, 5.7, 5.8, 5.9 and 6.0 kb in size. As a non-limiting example, the large single stranded vector genome may be 4.7 kb in size. As another non-limiting example, the large single stranded vector genome may be 4.8 kb in size. As yet another non-limiting example, the large single stranded vector genome may be 6.0 kb in size.

[0720] In some embodiments, the vector genome which comprises a nucleic acid sequence encoding GCase protein described herein may be a large double stranded vector genome. A large double stranded vector genome may be 2.2 to 3.0 kb in size such as about 2.2, 2.3, 2.4, 2.5, 2.6, 2.7, 2.8, 2.9 and 3.0 kb in size. As a non-limiting example, the large double stranded vector genome may be 2.4 kb in size.

### Backbone

[0721] In certain embodiments, a cis-element such as a vector backbone is incorporated into the viral particle encoding, e.g., a GBA protein or a GBA protein and an enhancement element described herein. Without wishing to be bound by theory, it is believed, in some embodiments, the backbone sequence may contribute to the stability of GBA protein expression, and/or the level of expression of the GBA protein.

[0722] The present disclosure also provides in some embodiments, a nucleic acid encoding a viral genome, e.g., a viral genome comprising the nucleotide sequence of any of the viral genomes in Tables 18-21 or 29-32, or a nucleotide sequence substantially identical (e.g., having at least 70%, 75%, 80%, 85%, 90%, 95%, 99% or 100%, sequence identity) thereto, an a backbone region suitable for replication of the viral genome in a cell, e.g., a bacterial cell (e.g., wherein the backbone region comprises one or both of a bacterial origin of replication and a selectable marker).

II. Viral production

### General Viral Production Process

[0723] Cells for the production of AAV, e.g., rAAV, particles may comprise, in some embodiments, mammalian cells (such as HEK293 cells) and/or insect cells (such as Sf9 cells).

[0724] In various embodiments, AAV production includes processes and methods for producing AAV particles and vectors which can contact a target cell to deliver a payload, e.g. a recombinant viral construct, which includes a nucleotide encoding a payload molecule. In certain embodiments, the viral vectors are adeno-associated viral (AAV) vectors such as recombinant adeno-associated viral (rAAV) vectors. In certain embodiments, the AAV particles are adeno-associated viral (AAV) particles such as recombinant adeno-associated viral (rAAV) particles.

[0725] In some embodiments, disclosed herein is a vector comprising a viral genome of the present disclosure. In some embodiments, disclosed herein is a cell comprising a viral genome of the present disclosure. In some embodiments, the cell is a bacterial cell, a mammalian cell (e.g., a HEK293 cell), or an insect cell (e.g., an Sf9 cell).

[0726] In some embodiments, disclosed herein is a method of making a viral genome. The method comprising providing a nucleic acid encoding a viral genome described herein and a backbone region suitable for replication of the viral genome in a cell, e.g., a bacterial cell (e.g., wherein the backbone region comprises one or both of a bacterial origin of replication and a selectable marker), and excising the viral genome from the backbone region, e.g., by cleaving the nucleic acid molecule at upstream and downstream of the viral genome. In some embodiments, the viral genome comprising a promoter operably linked to nucleic acid comprising a transgene encoding a GBA protein (e.g., a GBA protein described herein), will be incorporated into an AAV particle produced in the cell. In some embodiments, the cell is a bacterial cell, a mammalian cell (e.g., a HEK293 cell), or an insect cell (e.g., an Sf9 cell).

[0727] In some embodiments, disclosed herein is a method of making a recombinant AAV particle of the present disclosure, the method comprising (i) providing a host cell comprising a viral genome described herein and incubating the host cell under conditions suitable to enclose the viral genome in a capsid protein, e.g., a capsid protein described herein (e.g., a capsid protein listed in Table 1, e.g., a VOY101 capsid protein or functional variant thereof), thereby making the recombinant AAV particle. In some embodiments, the method comprises prior to step (i), introducing a first nucleic acid comprising the viral genome into a cell. In some embodiments, the host cell comprises a second nucleic acid encoding the capsid protein. In some embodiments, the second nucleic acid is introduced into the host cell prior to, concurrently with, or after the first nucleic acid molecule. In some embodiments, the host cell is a bacterial cell, a mammalian cell (e.g., a HEK293 cell), or an insect cell (e.g., an Sf9 cell).

[0728] In various embodiments, methods are provided herein of producing AAV particles or vectors by (a) contacting a viral production cell with one or more viral expression constructs encoding at least one AAV capsid protein, and one or more payload constructs encoding a payload molecule, which can be selected from: a transgene, a polynucleotide encoding protein, and a modulatory nucleic acid; (b) culturing the viral production cell under conditions such that at least one AAV particle or vector is produced, and (c) isolating the AAV particle or vector from the production stream.

[0729] In these methods, a viral expression construct may encode at least one structural protein and/or at least one non-structural protein. The structural protein may include any of the native or wild type capsid proteins VP1, VP2, and/or VP3, or a chimeric protein thereof. The non-structural protein may include any of the native or wild type Rep78, Rep68, Rep52, and/or Rep40 proteins or a chimeric protein thereof.

[0730] In certain embodiments, contacting occurs via transient transfection, viral transduction, and/or electroporation.

[0731] In certain embodiments, the viral production cell is selected from a mammalian cell and an insect cell. In certain embodiments, the insect cell includes a Spodoptera frugiperda insect cell. In certain embodiments, the insect cell includes a Sf9 insect cell. In certain embodiments, the insect cell includes a Sf21 insect cell.

[0732] The payload construct vector of the present disclosure may include, in various embodiments, at least one inverted terminal repeat (ITR) and may include mammalian DNA.

[0733] Also provided are AAV particles and viral vectors produced according to the methods described herein.

[0734] In various embodiments, the AAV particles of the present disclosure may be formulated as a pharmaceutical composition with one or more acceptable excipients.

[0735] In certain embodiments, an AAV particle or viral vector may be produced by a method described herein.

[0736] In certain embodiments, the AAV particles may be produced by contacting a viral production cell (e.g., an insect cell or a mammalian cell) with at least one viral expression construct encoding at least one capsid protein and at least one payload construct vector. The viral production cell may be contacted by transient transfection, viral transduction, and/or electroporation. The payload construct vector may include a payload construct encoding a payload molecule such as, but not limited to, a transgene, a polynucleotide encoding protein, and a modulatory nucleic acid. The viral production cell can be cultured under conditions such that at least one AAV particle or vector is produced, isolated (e.g., using temperature-induced lysis, mechanical lysis and/or chemical lysis) and/or purified (e.g., using filtration, chromatography, and/or immunoaffinity purification). As a non-limiting example, the payload construct vector may include mammalian DNA.

[0737] In certain embodiments, the AAV particles are produced in an insect cell (e.g., Spodoptera frugiperda (Sf9) cell) using a method described herein. As a non-limiting example, the insect cell is contacted using viral transduction which may include baculoviral transduction.

[0738] In certain embodiments, the AAV particles are produced in an mammalian cell (e.g., HEK293 cell) using a method described herein. As a non-limiting example, the mammalian cell is contacted using viral transduction which may include multiplasmid transient transfection (such as triple plasmid transient transfection).

[0739] In certain embodiments, the AAV particle production method described herein produces greater than 10¹, greater than 10², greater than 10³, greater than 10⁴, or greater than 10⁵ AAV particles in a viral production cell.

[0740] In certain embodiments, a process of the present disclosure includes production of viral particles in a viral production cell using a viral production system which includes at least one viral expression construct and at least one payload construct. The at least one viral expression construct and at least one payload construct can be co-transfected (e.g. dual transfection, triple transfection) into a viral production cell. The transfection is completed using standard molecular biology techniques known and routinely performed by a person skilled in the art. The viral production cell provides the cellular machinery necessary for expression of the proteins and other biomaterials necessary for producing the AAV particles, including Rep proteins which replicate the payload construct and Cap proteins which assemble to form a capsid that encloses the replicated payload constructs. The resulting AAV particle is extracted from the viral production cells and processed into a pharmaceutical preparation for administration.

[0741] In various embodiments, once administered, an AAV particle disclosed herein may, without being bound by theory, contact a target cell and enter the cell, e.g., in an endosome. The AAV particles, e.g., those released from the endosome, may subsequently contact the nucleus of the target cell to deliver the payload construct. The payload construct, e.g. recombinant viral construct, may be delivered to the nucleus of the target cell wherein the payload molecule encoded by the payload construct may be expressed.

[0742] In certain embodiments, the process for production of viral particles utilizes seed cultures of viral production cells that include one or more baculoviruses (e.g., a Baculoviral Expression Vector (BEV) or a baculovirus infected insect cell (BIIC) that has been transfected with a viral expression construct and a payload construct vector). In certain embodiments, the seed cultures are harvested, divided into aliquots and frozen, and may be used at a later time point to initiate an infection of a naïve population of production cells.

[0743] In some embodiments, large scale production of AAV particles utilizes a bioreactor. Without being bound by theory, the use of a bioreactor may allow for the precise measurement and/or control of variables that support the growth and activity of viral production cells such as mass, temperature, mixing conditions (impellor RPM or wave oscillation), CO₂ concentration, O₂ concentration, gas sparge rates and volumes, gas overlay rates and volumes, pH, Viable Cell Density (VCD), cell viability, cell diameter, and/or optical density (OD). In certain embodiments, the bioreactor is used for batch production in which the entire culture is harvested at an experimentally determined time point and AAV particles are purified. In some embodiments, the bioreactor is used for continuous production in which a portion of the culture is harvested at an experimentally determined time point for purification of AAV particles, and the remaining culture in the bioreactor is refreshed with additional growth media components.

[0744] In various embodiments, AAV viral particles can be extracted from viral production cells in a process which includes cell lysis, clarification, sterilization and purification. Cell lysis includes any process that disrupts the structure of the viral production cell, thereby releasing AAV particles. In certain embodiments, cell lysis may include thermal shock, chemical, or mechanical lysis methods. Clarification can include the gross purification of the mixture of lysed cells, media components, and AAV particles. In certain embodiments, clarification includes centrifugation and/or filtration, including but not limited to depth end, tangential flow, and/or hollow fiber filtration.

[0745] In various embodiments, the end result of viral production is a purified collection of AAV particles which include two components: (1) a payload construct (e.g. a recombinant AAV vector genome construct) and (2) a viral capsid.

[0746] In certain embodiments, a viral production system or process of the present disclosure includes steps for producing baculovirus infected insect cells (BIICs) using Viral Production Cells (VPC) and plasmid constructs. Viral Production Cells (VPCs) from a Cell Bank (CB) are thawed and expanded to provide a target working volume and VPC concentration. The resulting pool of VPCs is split into a Rep/Cap VPC pool and a Payload VPC pool. One or more Rep/Cap plasmid constructs (viral expression constructs) are processed into Rep/Cap Bacmid polynucleotides and transfected into the Rep/Cap VPC pool. One or more Payload plasmid constructs (payload constructs) are processed into Payload Bacmid polynucleotides and transfected into the Payload VPC pool. The two VPC pools are incubated to produce P1 Rep/Cap Baculoviral Expression Vectors (BEVs) and P1 Payload BEVs. The two BEV pools are expanded into a collection of Plaques, with a single Plaque being selected for Clonal Plaque (CP) Purification (also referred to as Single Plaque Expansion). The process can include a single CP Purification step or can include multiple CP Purification steps either in series or separated by other processing steps. The one-or-more CP Purification steps provide a CP Rep/Cap BEV pool and a CP Payload BEV pool. These two BEV pools can then be stored and used for future production steps, or they can be then transfected into VPCs to produce a Rep/Cap BIIC pool and a Payload BIIC pool.

[0747] In certain embodiments, a viral production system or process of the present disclosure includes steps for producing AAV particles using Viral Production Cells (VPC) and baculovirus infected insect cells (BIICs). Viral Production Cells (VPCs) from a Cell Bank (CB) are thawed and expanded to provide a target working volume and VPC concentration. The working volume of Viral Production Cells is seeded into a Production Bioreactor and can be further expanded to a working volume of 200-2000 L with a target VPC concentration for BIIC infection. The working volume of VPCs in the Production Bioreactor is then co-infected with Rep/Cap BIICs and Payload BIICs, with a target VPC:BIIC ratio and a target BIIC:BIIC ratio. VCD infection can also utilize BEVs. The co-infected VPCs are incubated and expanded in the Production Bioreactor to produce a bulk harvest of AAV particles and VPCs.

### Viral Expression Constructs

[0748] In various embodiments, the viral production system of the present disclosure includes one or more viral expression constructs that can be transfected/transduced into a viral production cell. In certain embodiments, a viral expression construct or a payload construct of the present disclosure can be a bacmid, also known as a baculovirus plasmid or recombinant baculovirus genome. In certain embodiments, the viral expression includes a protein-coding nucleotide sequence and at least one expression control sequence for expression in a viral production cell. In certain embodiments, the viral expression includes a protein-coding nucleotide sequence operably linked to least one expression control sequence for expression in a viral production cell. In certain embodiments, the viral expression construct contains parvoviral genes under control of one or more promoters. Parvoviral genes can include nucleotide sequences encoding non-structural AAV replication proteins, such as Rep genes which encode Rep52, Rep40, Rep68, or Rep78 proteins. Parvoviral genes can include nucleotide sequences encoding structural AAV proteins, such as Cap genes which encode VP1, VP2, and VP3 proteins.

[0749] Viral expression constructs of the present disclosure may include any compound or formulation, biological or chemical, which facilitates transformation, transfection, or transduction of a cell with a nucleic acid. Exemplary biological viral expression constructs include plasmids, linear nucleic acid molecules, and recombinant viruses including baculovirus. Exemplary chemical vectors include lipid complexes. Viral expression constructs are used to incorporate nucleic acid sequences into virus replication cells in accordance with the present disclosure. (O'Reilly, David R., Lois K. Miller, and Verne A. Luckow. Baculovirus expression vectors: a laboratory manual. Oxford University Press, 1994.); Maniatis et al., eds. Molecular Cloning. CSH Laboratory, NY, N.Y. (1982); and, Philiport and Scluber, eds. Liposomes as tools in Basic Research and Industry. CRC Press, Ann Arbor, Mich. (1995), the contents of each of which are herein incorporated by reference in their entirety as related to viral expression constructs and uses thereof.

[0750] In certain embodiments, the viral expression construct is an AAV expression construct which includes one or more nucleotide sequences encoding non-structural AAV replication proteins, structural AAV capsid proteins, or a combination thereof.

[0751] In certain embodiments, the viral expression construct of the present disclosure may be a plasmid vector. In certain embodiments, the viral expression construct of the present disclosure may be a baculoviral construct.

[0752] The present disclosure is not limited by the number of viral expression constructs employed to produce AAV particles or viral vectors. In certain embodiments, one, two, three, four, five, six, or more viral expression constructs can be employed to produce AAV particles in viral production cells in accordance with the present disclosure. In certain embodiments of the present disclosure, a viral expression construct may be used for the production of an AAV particles in insect cells. In certain embodiments, modifications may be made to the wild type AAV sequences of the capsid and/or rep genes, for example to improve attributes of the viral particle, such as increased infectivity or specificity, or to enhance production yields.

[0753] In certain embodiments, the viral expression construct may contain a nucleotide sequence which includes start codon region, such as a sequence encoding AAV capsid proteins which include one or more start codon regions. In certain embodiments, the start codon region can be within an expression control sequence. The start codon can be ATG or a non-ATG codon (i.e., a suboptimal start codon where the start codon of the AAV VP1 capsid protein is a non-ATG).

[0754] In certain embodiments, the viral expression construct used for AAV production may contain a nucleotide sequence encoding the AAV capsid proteins where the initiation codon of the AAV VP1 capsid protein is a non-ATG, i.e., a suboptimal initiation codon, allowing the expression of a modified ratio of the viral capsid proteins in the production system, to provide improved infectivity of the host cell. In a non-limiting example, a viral construct vector may contain a nucleic acid construct comprising a nucleotide sequence encoding AAV VP1, VP2, and VP3 capsid proteins, wherein the initiation codon for translation of the AAV VP1 capsid protein is CTG, TTG, or GTG, as described in U.S. Pat. No. 8,163,543, the contents of which are herein incorporated by reference in their entirety as related to AAV capsid proteins and the production thereof.

[0755] In certain embodiments, the viral expression construct of the present disclosure may be a plasmid vector or a baculoviral construct that encodes the parvoviral rep proteins for expression in insect cells. In certain embodiments, a single coding sequence is used for the Rep78 and Rep52 proteins, wherein start codon for translation of the Rep78 protein is a suboptimal start codon, selected from the group consisting of ACG, TTG, CTG, and GTG, that effects partial exon skipping upon expression in insect cells, as described in U.S. Pat. No. 8,512,981, the contents of which are herein incorporated by reference in their entirety, for example to promote less abundant expression of Rep78 as compared to Rep52, which may promote high vector yields.

[0756] In certain embodiments, a VP-coding region encodes one or more AAV capsid proteins of a specific AAV serotype. The AAV serotypes for VP-coding regions can be the same or different. In certain embodiments, a VP-coding region can be codon optimized. In certain embodiments, a VP-coding region or nucleotide sequence can be codon optimized for a mammal cell. In certain embodiments, a VP-coding region or nucleotide sequence can be codon optimized for an insect cell. In certain embodiments, a VP-coding region or nucleotide sequence can be codon optimized for a Spodoptera frugiperda cell. In certain embodiments, a VP-coding region or nucleotide sequence can be codon optimized for Sf9 or Sf21 cell lines.

[0757] In certain embodiments, a nucleotide sequence encoding one or more VP capsid proteins can be codon optimized to have a nucleotide homology with the reference nucleotide sequence of less than 100%. In certain embodiments, the nucleotide homology between the codon-optimized VP nucleotide sequence and the reference VP nucleotide sequence is less than 100%, less than 99%, less than 98%, less than 97%, less than 96%, less than 95%, less than 94%, less than 93%, less than 92%, less than 91%, less than 90%, less than 89%, less than 88%, less than 87%, less than 86%, less than 85%, less than 84%, less than 83%, less than 82%, less than 81%, less than 80%, less than 78%, less than 76%, less than 74%, less than 72%, less than 70%, less than 68%, less than 66%, less than 64%, less than 62%, less than 60%, less than 55%, less than 50%, and less than 40%.

[0758] In certain embodiments, a viral expression construct or a payload construct of the present disclosure can be a bacmid, also known as a baculovirus plasmid or recombinant baculovirus genome. In certain embodiments, a viral expression construct or a payload construct of the present disclosure (e.g. bacmid) can include a polynucleotide incorporated by homologous recombination (transposon donor/acceptor system) into the bacmid by standard molecular biology techniques known and performed by a person skilled in the art.

[0759] In certain embodiments, the polynucleotide incorporated into the bacmid (i.e. polynucleotide insert) can include an expression control sequence operably linked to a protein-coding nucleotide sequence. In certain embodiments, the polynucleotide incorporated into the bacmid can include an expression control sequence which includes a promoter, such as p10 or polh, and which is operably linked to a nucleotide sequence which encodes a structural AAV capsid protein (e.g. VP1, VP2, VP3 or a combination thereof). In certain embodiments, the polynucleotide incorporated into the bacmid can include an expression control sequence which includes a promoter, such as p10 or polh, and which is operably linked to a nucleotide sequence which encodes a non-structural AAV capsid protein (e.g. Rep78, Rep52, or a combination thereof).

[0760] The method of the present disclosure is not limited by the use of specific expression control sequences. However, when a certain stoichiometry of VP products are achieved (close to 1:1:10 for VP1, VP2, and VP3, respectively) and also when the levels of Rep52 or Rep40 (also referred to as the p19 Reps) are significantly higher than Rep78 or Rep68 (also referred to as the p5 Reps), improved yields of AAV in production cells (such as insect cells) may be obtained. In certain embodiments, the p5/p19 ratio is below 0.6 more, below 0.4, or below 0.3, but always at least 0.03. These ratios can be measured at the level of the protein or can be implicated from the relative levels of specific mRNAs.

[0761] In certain embodiments, AAV particles are produced in viral production cells (such as mammalian or insect cells) wherein all three VP proteins are expressed at a stoichiometry approaching, about or which is: 1:1:10 (VP1:VP2:VP3); 2:2:10 (VP1:VP2:VP3); 2:0:10 (VP1:VP2:VP3); 1-2:0-2:10 (VP1:VP2:VP3); 1-2:1-2:10 (VP1:VP2:VP3); 2-3:0-3:10 (VP1:VP2:VP3); 2-3:2-3:10 (VP1:VP2:VP3); 3:3:10 (VP1:VP2:VP3); 3-5:0-5:10 (VP1:VP2:VP3); or 3-5:3-5:10 (VP1:VP2:VP3).

[0762] In certain embodiments, the expression control regions are engineered to produce a VP1:VP2:VP3 ratio selected from the group consisting of: about or exactly 1:0:10; about or exactly 1:1:10; about or exactly 2:1:10; about or exactly 2:1:10; about or exactly 2:2:10; about or exactly 3:0:10; about or exactly 3:1:10; about or exactly 3:2:10; about or exactly 3:3:10; about or exactly 4:0:10; about or exactly 4:1:10; about or exactly 4:2:10; about or exactly 4:3:10; about or exactly 4:4:10; about or exactly 5:5:10; about or exactly 1-2:0-2:10; about or exactly 1-2:1-2:10; about or exactly 1-3:0-3:10; about or exactly 1-3:1-3:10; about or exactly 1-4:0-4:10; about or exactly 1-4:1-4:10; about or exactly 1-5:1-5:10; about or exactly 2-3:0-3:10; about or exactly 2-3:2-3:10; about or exactly 2-4:2-4:10; about or exactly 2-5:2-5:10; about or exactly 3-4:3-4:10; about or exactly 3-5:3-5:10; and about or exactly 4-5:4-5:10.

[0763] In certain embodiments of the present disclosure, Rep52 or Rep78 is transcribed from the baculoviral derived polyhedron promoter (polh). Rep52 or Rep78 can also be transcribed from a weaker promoter, for example a deletion mutant of the ie-1 promoter, the Δie-1 promoter, has about 20% of the transcriptional activity of that ie-1 promoter. A promoter substantially homologous to the Δie-1 promoter may be used. In respect to promoters, a homology of at least 50%, 60%, 70%, 80%, 90% or more, is considered to be a substantially homologous promoter.

### Mammalian Cells

[0764] Viral production of the present disclosure disclosed herein describes processes and methods for producing AAV particles or viral vector that contacts a target cell to deliver a payload construct, e.g. a recombinant AAV particle or viral construct, which includes a nucleotide encoding a payload molecule. The viral production cell may be selected from any biological organism, including prokaryotic (e.g., bacterial) cells, and eukaryotic cells, including, insect cells, yeast cells and mammalian cells.

[0765] In certain embodiments, the AAV particles of the present disclosure may be produced in a viral production cell that includes a mammalian cell. Viral production cells may comprise mammalian cells such as A549, WEH1, 3T3, 10T1/2, BHK, MDCK, COS 1, COS 7, BSC 1, BSC 40, BMT 10, VERO, W138, HeLa, HEK293, HEK293T (293T), Saos, C2C12, L cells, HT1080, Huh7, HepG2, C127, 3T3, CHO, HeLa cells, KB cells, BHK and primary fibroblast, hepatocyte, and myoblast cells derived from mammals. Viral production cells can include cells derived from any mammalian species including, but not limited to, human, monkey, mouse, rat, rabbit, and hamster or cell type, including but not limited to fibroblast, hepatocyte, tumor cell, cell line transformed cell, etc.

[0766] AAV viral production cells commonly used for production of recombinant AAV particles include, but is not limited to other mammalian cell lines as described in U.S. Pat. Nos. 6,156,303, 5,387,484, 5,741,683, 5,691,176, 6,428,988 and 5,688,676; U.S. patent application 2002/0081721, and International Patent Publication Nos. WO 00/47757, WO 00/24916, and WO 96/17947, the contents of each of which are herein incorporated by reference in their entireties insofar as they do no conflict with the present disclosure. In certain embodiments, the AAV viral production cells are trans-complementing packaging cell lines that provide functions deleted from a replication-defective helper virus, e.g., HEK293 cells or other Ea trans-complementing cells.

[0767] In certain embodiments, the packaging cell line 293-10-3 (ATCC Accession No. PTA-2361) may be used to produce the AAV particles, as described in U.S. Pat. No. 6,281,010, the contents of which are herein incorporated by reference in their entirety as related to the 293-10-3 packaging cell line and uses thereof.

[0768] In certain embodiments, of the present disclosure a cell line, such as a HeLA cell line, for trans-complementing E1 deleted adenoviral vectors, which encoding adenovirus Ela and adenovirus E1b under the control of a phosphoglycerate kinase (PGK) promoter can be used for AAV particle production as described in U.S. Pat. No. 6,365,394, the contents of which are incorporated herein by reference in their entirety as related to the HeLa cell line and uses thereof.

[0769] In certain embodiments, AAV particles are produced in mammalian cells using a multiplasmid transient transfection method (such as triple plasmid transient transfection). In certain embodiments, the multiplasmid transient transfection method includes transfection of the following three different constructs: (i) a payload construct, (ii) a Rep/Cap construct (parvoviral Rep and parvoviral Cap), and (iii) a helper construct. In certain embodiments, the triple transfection method of the three components of AAV particle production may be utilized to produce small lots of virus for assays including transduction efficiency, target tissue (tropism) evaluation, and stability. In certain embodiments, the triple transfection method of the three components of AAV particle production may be utilized to produce large lots of materials for clinical or commercial applications.

[0770] AAV particles to be formulated may be produced by triple transfection or baculovirus mediated virus production, or any other method known in the art. Any suitable permissive or packaging cell known in the art may be employed to produce the vectors. In certain embodiments, trans-complementing packaging cell lines are used that provide functions deleted from a replication-defective helper virus, e.g., 293 cells or other Ela trans-complementing cells.

[0771] The gene cassette may contain some or all of the parvovirus (e.g., AAV) cap and rep genes. In certain embodiments, some or all of the cap and rep functions are provided in trans by introducing a packaging vector(s) encoding the capsid and/or Rep proteins into the cell. In certain embodiments, the gene cassette does not encode the capsid or Rep proteins. Alternatively, a packaging cell line is used that is stably transformed to express the cap and/or rep genes.

[0772] Recombinant AAV virus particles are, in certain embodiments, produced and purified from culture supernatants according to the procedure as described in US2016/0032254, the contents of which are incorporated by reference in their entirety as related to the production and processing of recombinant AAV virus particles. Production may also involve methods known in the art including those using 293T cells, triple transfection or any suitable production method.

[0773] In certain embodiments, mammalian viral production cells (e.g. 293T cells) can be in an adhesion/adherent state (e.g. with calcium phosphate) or a suspension state (e.g. with polyethyleneimine (PEI)). The mammalian viral production cell is transfected with plasmids required for production of AAV, (i.e., AAV rep/cap construct, an adenoviral helper construct, and/or ITR flanked payload construct). In certain embodiments, the transfection process can include optional medium changes (e.g. medium changes for cells in adhesion form, no medium changes for cells in suspension form, medium changes for cells in suspension form if desired). In certain embodiments, the transfection process can include transfection mediums such as DMEM or F17. In certain embodiments, the transfection medium can include serum or can be serum-free (e.g. cells in adhesion state with calcium phosphate and with serum, cells in suspension state with PEI and without serum).

[0774] Cells can subsequently be collected by scraping (adherent form) and/or pelleting (suspension form and scraped adherent form) and transferred into a receptacle. Collection steps can be repeated as necessary for full collection of produced cells. Next, cell lysis can be achieved by consecutive freeze-thaw cycles (−80C to 37C), chemical lysis (such as adding detergent triton), mechanical lysis, or by allowing the cell culture to degrade after reaching ˜0% viability. Cellular debris is removed by centrifugation and/or depth filtration. The samples are quantified for AAV particles by DNase resistant genome titration by DNA qPCR.

[0775] AAV particle titers are measured according to genome copy number (genome particles per milliliter). Genome particle concentrations are based on DNA qPCR of the vector DNA as previously reported (Clark et al. (1999) Hum. Gene Ther., 10:1031-1039; Veldwijk et al. (2002) Mol. Ther., 6:272-278, the contents of which are each incorporated by reference in their entireties as related to the measurement of particle concentrations).

### Insect Cells

[0776] Viral production of the present disclosure includes processes and methods for producing AAV particles or viral vectors that contact a target cell to deliver a payload construct, e.g., a recombinant viral construct, which includes a nucleotide encoding a payload molecule. In certain embodiments, the AAV particles or viral vectors of the present disclosure may be produced in a viral production cell that includes an insect cell.

[0777] Growing conditions for insect cells in culture, and production of heterologous products in insect cells in culture are well-known in the art, see U.S. Pat. No. 6,204,059, the contents of which are herein incorporated by reference in their entirety as related to the growth and use of insect cells in viral production.

[0778] Any insect cell which allows for replication of parvovirus and which can be maintained in culture can be used in accordance with the present disclosure. AAV viral production cells commonly used for production of recombinant AAV particles include, but is not limited to, Spodoptera frugiperda, including, but not limited to the Sf9 or Sf21 cell lines, Drosophila cell lines, or mosquito cell lines, such as Aedes albopictus derived cell lines. Use of insect cells for expression of heterologous proteins is well documented, as are methods of introducing nucleic acids, such as vectors, e.g., insect-cell compatible vectors, into such cells and methods of maintaining such cells in culture. See, for example, Methods in Molecular Biology, ed. Richard, Humana Press, N J (1995); O'Reilly et al., Baculovirus Expression Vectors, A Laboratory Manual, Oxford Univ. Press (1994); Samulski et al., J. Vir.63:3822-8 (1989); Kajigaya et al., Proc. Nat'l. Acad. Sci. USA 88: 4646-50 (1991); Ruffing et al., J. Vir. 66:6922-30 (1992); Kimbauer et al., Vir.219:37-44 (1996); Zhao et al., Vir.272:382-93 (2000); and Samulski et al., U.S. Pat. No. 6,204,059, the contents of each of which are herein incorporated by reference in their entirety as related to the use of insect cells in viral production.

[0779] In some embodiments, the AAV particles are made using the methods described in WO2015/191508, the contents of which are herein incorporated by reference in their entirety insofar as they do not conflict with the present disclosure.

[0780] In certain embodiments, insect host cell systems, in combination with baculoviral systems (e.g., as described by Luckow et al., Bio/Technology 6: 47 (1988)) may be used. In certain embodiments, an expression system for preparing chimeric peptide is Trichoplusia ni, Tn 5B1-4 insect cells/baculoviral system, which can be used for high levels of proteins, as described in U.S. Pat. No. 6,660,521, the contents of which are herein incorporated by reference in their entirety as related to the production of viral particles.

[0781] Expansion, culturing, transfection, infection and storage of insect cells can be carried out in any cell culture media, cell transfection media or storage media known in the art, including Hyclone™ SFX-Insect™ Cell Culture Media, Expression System ESF AF™ Insect Cell Culture Medium, ThermoFisher Sf-900II™ media, ThermoFisher Sf-900III™ media, or ThermoFisher Grace's Insect Media. Insect cell mixtures of the present disclosure can also include any of the formulation additives or elements described in the present disclosure, including (but not limited to) salts, acids, bases, buffers, surfactants (such as Poloxamer 188/Pluronic F-68), and other known culture media elements. Formulation additives can be incorporated gradually or as “spikes” (incorporation of large volumes in a short time).

### Baculovirus-Production Systems

[0782] In certain embodiments, processes of the present disclosure can include production of AAV particles or viral vectors in a baculoviral system using a viral expression construct and a payload construct vector. In certain embodiments, the baculoviral system includes Baculovirus expression vectors (BEVs) and/or baculovirus infected insect cells (BIICs). In certain embodiments, a viral expression construct or a payload construct of the present disclosure can be a bacmid, also known as a baculovirus plasmid or recombinant baculovirus genome. In certain embodiments, a viral expression construct or a payload construct of the present disclosure can be polynucleotide incorporated by homologous recombination (transposon donor/acceptor system) into a bacmid by standard molecular biology techniques known and performed by a person skilled in the art. Transfection of separate viral replication cell populations produces two or more groups (e.g. two, three) of baculoviruses (BEVs), one or more group which can include the viral expression construct (Expression BEV), and one or more group which can include the payload construct (Payload BEV). The baculoviruses may be used to infect a viral production cell for production of AAV particles or viral vector.

[0783] In certain embodiments, the process includes transfection of a single viral replication cell population to produce a single baculovirus (BEV) group which includes both the viral expression construct and the payload construct. These baculoviruses may be used to infect a viral production cell for production of AAV particles or viral vector.

[0784] In certain embodiments, BEVs are produced using a Bacmid Transfection agent, such as Promega FuGENE® HD, WFI water, or ThermoFisher Cellfectin® II Reagent. In certain embodiments, BEVs are produced and expanded in viral production cells, such as an insect cell.

[0785] In certain embodiments, the method utilizes seed cultures of viral production cells that include one or more BEVs, including baculovirus infected insect cells (BIICs). The seed BIICs have been transfected/transduced/infected with an Expression BEV which includes a viral expression construct, and also a Payload BEV which includes a payload construct. In certain embodiments, the seed cultures are harvested, divided into aliquots and frozen, and may be used at a later time to initiate transfection/transduction/infection of a naïve population of production cells. In certain embodiments, a bank of seed BIICs is stored at −80° C. or in LN2 vapor.

[0786] Baculoviruses are made of several essential proteins which are essential for the function and replication of the Baculovirus, such as replication proteins, envelope proteins and capsid proteins. The Baculovirus genome thus includes several essential-gene nucleotide sequences encoding the essential proteins. As a non-limiting example, the genome can include an essential-gene region which includes an essential-gene nucleotide sequence encoding an essential protein for the Baculovirus construct. The essential protein can include: GP64 baculovirus envelope protein, VP39 baculovirus capsid protein, or other similar essential proteins for the Baculovirus construct.

[0787] Baculovirus expression vectors (BEV) for producing AAV particles in insect cells, including but not limited to Spodoptera frugiperda (Sf9) cells, provide high titers of viral vector product. Recombinant baculovirus encoding the viral expression construct and payload construct initiates a productive infection of viral vector replicating cells. Infectious baculovirus particles released from the primary infection secondarily infect additional cells in the culture, exponentially infecting the entire cell culture population in a number of infection cycles that is a function of the initial multiplicity of infection, see Urabe, M. et al. J Virol. 2006 February; 80(4):1874-85, the contents of which are herein incorporated by reference in their entirety as related to the production and use of BEVs and viral particles.

[0788] Production of AAV particles with baculovirus in an insect cell system may address known baculovirus genetic and physical instability.

[0789] In certain embodiments, the production system of the present disclosure addresses baculovirus instability over multiple passages by utilizing a titerless infected-cells preservation and scale-up system. Small scale seed cultures of viral producing cells are transfected with viral expression constructs encoding the structural and/or non-structural components of the AAV particles. Baculovirus-infected viral producing cells are harvested into aliquots that may be cryopreserved in liquid nitrogen; the aliquots retain viability and infectivity for infection of large scale viral producing cell culture. Wasilko D J et al. Protein Expr Purif. 2009 June; 65(2):122-32, the contents of which are herein incorporated by reference in their entirety as related to the production and use of BEVs and viral particles.

[0790] A genetically stable baculovirus may be used to produce a source of the one or more of the components for producing AAV particles in invertebrate cells. In certain embodiments, defective baculovirus expression vectors may be maintained episomally in insect cells. In such embodiments, the corresponding bacmid vector is engineered with replication control elements, including but not limited to promoters, enhancers, and/or cell-cycle regulated replication elements.

[0791] In certain embodiments, stable viral producing cells permissive for baculovirus infection are engineered with at least one stable integrated copy of any of the elements necessary for AAV replication and vector production including, but not limited to, the entire AAV genome, Rep and Cap genes, Rep genes, Cap genes, each Rep protein as a separate transcription cassette, each VP protein as a separate transcription cassette, the AAP (assembly activation protein), or at least one of the baculovirus helper genes with native or non-native promoters.

[0792] In some embodiments, the AAV particle of the present disclosure may be produced in insect cells (e.g., Sf9 cells).

[0793] In some embodiments, the AAV particle of the present disclosure may be produced using triple transfection.

[0794] In some embodiments, the AAV particle of the present disclosure may be produced in mammalian cells.

[0795] In some embodiments, the AAV particle of the present disclosure may be produced by triple transfection in mammalian cells.

[0796] In some embodiments, the AAV particle of the present disclosure may be produced by triple transfection in HEK293 cells.

[0797] The AAV viral genomes encoding GCase protein described herein may be useful in the fields of human disease, veterinary applications and a variety of in vivo and in vitro settings. The AAV particles of the present disclosure may be useful in the field of medicine for the treatment, prophylaxis, palliation, or amelioration of neurological or neuromuscular diseases and/or disorders. In some embodiments, the AAV particles of the disclosure are used for the prevention and/or treatment of GBA-related disorders.

[0798] Various embodiments of the disclosure herein provide a pharmaceutical composition comprising the AAV particle described herein and a pharmaceutically acceptable excipient.

[0799] Various embodiments of the disclosure herein provide a method of treating a subject in need thereof comprising administering to the subject a therapeutically effective amount of the pharmaceutical composition described herein.

[0800] Certain embodiments of the method provide that the subject is treated by a route of administration of the pharmaceutical composition selected from the group consisting of: intravenous, intracerebroventricular, intraparenchymal, intrathecal, subpial, and intramuscular, or a combination thereof. Certain embodiments of the method provide that the subject is treated for GBA-related disorders and/or other neurological disorder arising from a deficiency in the quantity or function of GBA gene products. In one aspect of the method, a pathological feature of the GBA-related disorders or the other neurological disorder is alleviated and/or the progression of the GBA-related disorders or the other neurological disorder is halted, slowed, ameliorated, or reversed.

[0801] Various embodiments of the disclosure herein describe a method of increasing the level of GCase protein in the central nervous system of a subject in need thereof comprising administering to said subject via infusion, an effective amount of the pharmaceutical composition described herein.

[0802] Also described herein are compositions, methods, processes, kits and devices for the design, preparation, manufacture and/or formulation of AAV particles. In some embodiments, payloads, such as but not limited to payloads comprising GCase protein, may be encoded by payload constructs or contained within plasmids or vectors or recombinant adeno-associated viruses (AAVs).

[0803] The present disclosure also provides administration and/or delivery methods for vectors and viral particles, e.g., AAV particles, for the treatment or amelioration of GBA-related disorders. Such methods may involve gene replacement or gene activation. Such outcomes are achieved by utilizing the methods and compositions taught herein.

### III. Pharmaceutical Compositions

[0804] The present disclosure additionally provides a method for treating GBA-related disorders and disorders related to deficiencies in the function or expression of GCase protein(s) in a mammalian subject, including a human subject, comprising administering to the subject any of the AAV polynucleotides or AAV genomes described herein (i.e., “vector genomes,” “viral genomes,” or “VGs”) or administering to the subject a particle comprising said AAV polynucleotide or AAV genome, or administering to the subject any of the described compositions, including pharmaceutical compositions.

[0805] As used herein the term “composition” comprises an AAV polynucleotide or AAV genome or AAV particle and at least one excipient.

[0806] As used herein the term “pharmaceutical composition” comprises an AAV polynucleotide or AAV genome or AAV particle and one or more pharmaceutically acceptable excipients.

[0807] Although the descriptions of pharmaceutical compositions, e.g., AAV comprising a payload encoding a GCase protein to be delivered, provided herein are principally directed to pharmaceutical compositions which are suitable for administration to humans, it will be understood by the skilled artisan that such compositions are generally suitable for administration to any other animal, e.g., to non-human animals, e.g. non-human mammals. Modification of pharmaceutical compositions suitable for administration to humans in order to render the compositions suitable for administration to various animals is well understood, and the ordinarily skilled veterinary pharmacologist can design and/or perform such modification with merely ordinary, if any, experimentation. Subjects to which administration of the pharmaceutical compositions is contemplated include, but are not limited to, humans and/or other primates; mammals, including commercially relevant mammals such as cattle, pigs, horses, sheep, cats, dogs, mice, and/or rats; and/or birds, including commercially relevant birds such as poultry, chickens, ducks, geese, and/or turkeys.

[0808] In some embodiments, compositions are administered to humans, human patients, or subjects.

[0809] In some embodiments, the AAV particle formulations described herein may contain a nucleic acid encoding at least one payload. In some embodiments, the formulations may contain a nucleic acid encoding 1, 2, 3, 4, or 5 payloads. In some embodiments, the formulation may contain a nucleic acid encoding a payload construct encoding proteins selected from categories such as, but not limited to, human proteins, veterinary proteins, bacterial proteins, biological proteins, antibodies, immunogenic proteins, therapeutic peptides and proteins, secreted proteins, plasma membrane proteins, cytoplasmic proteins, cytoskeletal proteins, intracellular membrane bound proteins, nuclear proteins, proteins associated with human disease, and/or proteins associated with non-human diseases. In some embodiments, the formulation contains at least three payload constructs encoding proteins. Certain embodiments provide that at least one of the payloads is GCase protein or a variant thereof.

[0810] A pharmaceutical composition in accordance with the present disclosure may be prepared, packaged, and/or sold in bulk, as a single unit dose, and/or as a plurality of single unit doses. As used herein, a “unit dose” refers to a discrete amount of the pharmaceutical composition comprising a predetermined amount of the active ingredient. The amount of the active ingredient is generally equal to the dosage of the active ingredient which would be administered to a subject and/or a convenient fraction of such a dosage such as, for example, one-half or one-third of such a dosage.

### IV. Formulations

[0811] Formulations of the AAV pharmaceutical compositions described herein may be prepared by any method known or hereafter developed in the art of pharmacology. In general, such preparatory methods include the step of bringing the active ingredient into association with an excipient and/or one or more other accessory ingredients, and then, if necessary and/or desirable, dividing, shaping and/or packaging the product into a desired single- or multi-dose unit.

[0812] Relative amounts of the active ingredient, the pharmaceutically acceptable excipient, and/or any additional ingredients in a pharmaceutical composition in accordance with the disclosure will vary, depending upon the identity, size, and/or condition of the subject treated and further depending upon the route by which the composition is to be administered.

[0813] For example, the composition may comprise between 0.1% and 99% (w/w) of the active ingredient. By way of example, the composition may comprise between 0.1% and 100%, e.g., between 0.5% and 50%, between 1-30%, between 5-80%, or at least 80% (w/w) active ingredient.

[0814] The AAV particles of the disclosure can be formulated using one or more excipients to: (1) increase stability; (2) increase cell transfection or transduction; (3) permit the sustained or delayed release; (4) alter the biodistribution (e.g., target the viral particle to specific tissues or cell types); (5) increase the translation of encoded protein in vivo; (6) alter the release profile of encoded protein in vivo and/or (7) allow for regulatable expression of the payload.

[0815] Formulations of the present disclosure can include, without limitation, saline, lipidoids, liposomes, lipid nanoparticles, polymers, lipoplexes, core-shell nanoparticles, peptides, proteins, cells transfected with viral vectors (e.g., for transplantation into a subject), nanoparticle mimics and combinations thereof. Further, the viral vectors of the present disclosure may be formulated using self-assembled nucleic acid nanoparticles.

[0816] In some embodiments, the viral vectors encoding GCase protein may be formulated to optimize baricity and/or osmolality. In some embodiments, the baricity and/or osmolality of the formulation may be optimized to ensure optimal drug distribution in the central nervous system or a region or component of the central nervous system.

[0817] In some embodiments, the AAV particles of the disclosure may be formulated in PBS with 0.001% of pluronic acid (F-68) at a pH of about 7.0.

[0818] In some embodiments, the AAV particles of the disclosure may be formulated in PBS, in combination with an ethylene oxide/propylene oxide copolymer (also known as pluronic or poloxamer).

[0819] In some embodiments, the AAV particles of the disclosure may be formulated in PBS with 0.001% pluronic acid (F-68) (poloxamer 188) at a pH of about 7.0.

[0820] In some embodiments, the AAV particles of the disclosure may be formulated in PBS with 0.001% pluronic acid (F-68) (poloxamer 188) at a pH of about 7.3.

[0821] In some embodiments, the AAV particles of the disclosure may be formulated in PBS with 0.001% pluronic acid (F-68) (poloxamer 188) at a pH of about 7.4.

[0822] In some embodiments, the AAV particles of the disclosure may be formulated in a solution comprising sodium chloride, sodium phosphate and an ethylene oxide/propylene oxide copolymer.

[0823] In some embodiments, the AAV particles of the disclosure may be formulated in a solution comprising sodium chloride, sodium phosphate dibasic, potassium chloride, potassium phosphate monobasic, and poloxamer 188/pluronic acid (F-68).

[0824] In some embodiments, the AAV particles of the disclosure may be formulated in a solution comprising 192 mM sodium chloride, 10 mM sodium phosphate (dibasic), 2.7 mM potassium chloride, 2 mM potassium phosphate (monobasic) and 0.001% pluronic F-68 (v/v), at pH 7.4. This formulation is referred to as Formulation 1 in the present disclosure.

[0825] In some embodiments, the AAV particles of the disclosure may be formulated in a solution comprising about 192 mM sodium chloride, about 10 mM sodium phosphate dibasic and about 0.001% poloxamer 188, at a pH of about 7.3. The concentration of sodium chloride in the final solution may be 150 mM-200 mM. As non-limiting examples, the concentration of sodium chloride in the final solution may be 150 mM, 160 mM, 170 mM, 180 mM, 190 mM or 200 mM. The concentration of sodium phosphate dibasic in the final solution may be 1 mM-50 mM. As non-limiting examples, the concentration of sodium phosphate dibasic in the final solution may be 1 mM, 2 mM, 3 mM, 4 mM, 5 mM, 6 mM, 7 mM, 8 mM, 9 mM, 10 mM, 15 mM, 20 mM, 25 mM, 30 mM, 40 mM, or 50 mM. The concentration of poloxamer 188 (pluronic acid (F-68)) may be 0.0001%-1%. As non-limiting examples, the concentration of poloxamer 188 (pluronic acid (F-68)) may be 0.0001%, 0.0005%, 0.001%, 0.005%, 0.01%, 0.05%, 0.1%, 0.5%, or 1%. The final solution may have a pH of 6.8-7.7. Non-limiting examples for the pH of the final solution include a pH of 6.8, 6.9, 7.0, 7.1, 7.2, 7.3, 7.4, 7.5, 7.6, or 7.7.

[0826] In some embodiments, the AAV particles of the disclosure may be formulated in a solution comprising about 1.05% sodium chloride, about 0.212% sodium phosphate dibasic, heptahydrate, about 0.025% sodium phosphate monobasic, monohydrate, and 0.001% poloxamer 188, at a pH of about 7.4. As a non-limiting example, the concentration of AAV particle in this formulated solution may be about 0.001%. The concentration of sodium chloride in the final solution may be 0.1-2.0%, with non-limiting examples of 0.1%, 0.25%, 0.5%, 0.75%, 0.95%, 0.96%, 0.97%, 0.98%, 0.99%, 1.00%, 1.01%, 1.02%, 1.03%, 1.04%, 1.05%, 1.06%, 1.07%, 1.08%, 1.09%, 1.10%, 1.25%, 1.5%, 1.75%, or 2%. The concentration of sodium phosphate dibasic in the final solution may be 0.100-0.300% with non-limiting examples including 0.100%, 0.125%, 0.150%, 0.175%, 0.200%, 0.210%, 0.211%, 0.212%, 0.213%, 0.214%, 0.215%, 0.225%, 0.250%, 0.275%, 0.300%. The concentration of sodium phosphate monobasic in the final solution may be 0.010-0.050%, with non-limiting examples of 0.010%, 0.015%, 0.020%, 0.021%, 0.022%, 0.023%, 0.024%, 0.025%, 0.026%, 0.027%, 0.028%, 0.029%, 0.030%, 0.035%, 0.040%, 0.045%, or 0.050%. The concentration of poloxamer 188 (pluronic acid (F-68)) may be 0.0001%-1%. As non-limiting examples, the concentration of poloxamer 188 (pluronic acid (F-68)) may be 0.0001%, 0.0005%, 0.001%, 0.005%, 0.01%, 0.05%, 0.1%, 0.5%, or 1%. The final solution may have a pH of 6.8-7.7. Non-limiting examples for the pH of the final solution include a pH of 6.8, 6.9, 7.0, 7.1, 7.2, 7.3, 7.4, 7.5, 7.6, or 7.7.

### Excipients

[0827] The formulations of the disclosure can include one or more excipients, each in an amount that together increases the stability of the AAV particle, increases cell transfection or transduction by the viral particle, increases the expression of viral particle encoded protein, and/or alters the release profile of AAV particle encoded proteins. In some embodiments, a pharmaceutically acceptable excipient may be at least 95%, at least 96%, at least 97%, at least 98%, at least 99%, or 100% pure. In some embodiments, an excipient is approved for use for humans and for veterinary use. In some embodiments, an excipient may be approved by United States Food and Drug Administration. In some embodiments, an excipient may be of pharmaceutical grade. In some embodiments, an excipient may meet the standards of the United States Pharmacopoeia (USP), the European Pharmacopoeia (EP), the British Pharmacopoeia, and/or the International Pharmacopoeia.

[0828] Excipients, which, as used herein, include, but are not limited to, any and all solvents, dispersion media, diluents, or other liquid vehicles, dispersion or suspension aids, surface active agents, isotonic agents, thickening or emulsifying agents, preservatives, and the like, as suited to the particular dosage form desired. Various excipients for formulating pharmaceutical compositions and techniques for preparing the composition are known in the art (see Remington: The Science and Practice of Pharmacy, 21st Edition, A. R. Gennaro, Lippincott, Williams & Wilkins, Baltimore, Md., 2006; the contents of which are herein incorporated by reference in their entirety). The use of a conventional excipient medium may be contemplated within the scope of the present disclosure, except insofar as any conventional excipient medium may be incompatible with a substance or its derivatives, such as by producing any undesirable biological effect or otherwise interacting in a deleterious manner with any other component(s) of the pharmaceutical composition.

### Inactive Ingredients

[0829] In some embodiments, AAV formulations may comprise at least one excipient which is an inactive ingredient. As used herein, the term “inactive ingredient” refers to one or more agents that do not contribute to the activity of the pharmaceutical composition included in formulations. In some embodiments, all, none, or some of the inactive ingredients which may be used in the formulations of the present disclosure may be approved by the US Food and Drug Administration (FDA).

[0830] Formulations of AAV particles disclosed herein may include cations or anions. In some embodiments, the formulations include metal cations such as, but not limited to, Zn²⁺, Ca²⁺, Cu²⁺, Mg⁺, or combinations thereof. In some embodiments, formulations may include polymers or polynucleotides complexed with a metal cation (see, e.g., U.S. Pat. Nos. 6,265,389 and 6,555,525, the contents of each of which are herein incorporated by reference in their entirety).

### V. Uses and Applications

[0831] The compositions of the disclosure may be administered to a subject or used in the manufacture of a medicament for administration to a subject having a deficiency in the quantity or function of GCase protein or having a disease or condition associated with decreased GCase protein expression. In some embodiments, the disease is Parkinson Disease (PD), e.g., a PD with a mutation in a GBA gene. In certain embodiments, the AAV particles including GCase protein may be administered to a subject to treat Parkinson Disease, e.g., as PD associated with a mutation in a GBA gene. In some embodiments, administration of the AAV particles comprising viral genomes that encode GCase protein may protect central nervous system pathways from degeneration. The compositions and methods described herein are also useful for treating Gaucher disease (such as Type 1 or 2 GD) and Dementia with Lewy Bodies, and other GBA-related disorders.

[0832] In some embodiments, the delivery of the AAV particles may halt or slow progression of GBA-related disorders as measured by cholesterol accumulation in CNS cells (as determined, for example, by filipin staining and quantification). In certain embodiments, the delivery of the AAV particles improves symptoms of GBA-related disorders, including, for example, cognitive, muscular, physical, and sensory symptoms of GBA-related disorders.

[0833] In some embodiments, the present disclosure encompasses the delivery of pharmaceutical, prophylactic, diagnostic, or imaging compositions in combination with agents that may improve their bioavailability, reduce and/or modify their metabolism, and/or modify their distribution within the body.

[0834] In certain embodiments, the pharmaceutical compositions described herein are used as research tools, particularly in in vitro investigations using human cell lines such as HEK293T and in vivo testing in nonhuman primates which will occur prior to human clinical trials.

### CNS Diseases

[0835] The present disclosure provides a method for treating a disease, disorder and/or condition in a mammalian subject, including a human subject, comprising administering to the subject any of the viral particles e.g., AAV, AAV particle, or AAV genome that produces GCase protein described herein (i.e., viral genomes or “VG”) or administering to the subject a particle comprising said AAV particle or AAV genome, or administering to the subject any of the described compositions, including pharmaceutical compositions.

[0836] In some embodiments, AAV particles of the present disclosure, through delivery of a functional payload that is a therapeutic product comprising a GCase protein or variant thereof that can modulate the level or function of a gene product in the CNS.

[0837] A functional payload may alleviate or reduce symptoms that result from abnormal level and/or function of a gene product (e.g., an absence or defect in a protein) in a subject in need thereof or that otherwise confers a benefit to a CNS disorder in a subject in need thereof.

[0838] As non-limiting examples, companion or combination therapeutic products delivered by AAV particles of the present disclosure may include, but are not limited to, growth and trophic factors, cytokines, hormones, neurotransmitters, enzymes, anti-apoptotic factors, angiogenic factors, GCase proteins, and any protein known to be mutated in pathological disorders such as GBA-related disorders.

[0839] In some embodiments, AAV particles of the present disclosure may be used to treat diseases that are associated with impairments of the growth and development of the CNS, i.e., neurodevelopmental disorders. In some aspects, such neurodevelopmental disorders may be caused by genetic mutations.

[0840] In some embodiments, the neurological disorders may be functional neurological disorders with motor and/or sensory symptoms which have neurological origin in the CNS. As non-limiting examples, functional neurological disorders may be chronic pain, seizures, speech problems, involuntary movements, or sleep disturbances.

[0841] In some embodiments, the neurological or neuromuscular disease, disorder, and/or condition is GBA-related disorders. In some embodiments, the delivery of the AAV particles may halt or slow the disease progression of GBA-related disorders by 10%, 20%, 30%, 40%, 50%, 60%, 70%, 80%, 90%, 95%, or more than 95% using a known analysis method and comparator group for GBA-related disorders. As a non-limiting example, the delivery of the AAV particles may halt or slow progression of GBA-related disorders as measured by cholesterol accumulation in CNS cells (as determined, for example, by filipin staining and quantification).

[0842] In some embodiments, the AAV particles described herein increase the amount of GCase protein in a tissue by 1%, 2%, 3%, 4%, 5%, 6%, 7%, 8%, 9%, 10%, 11%, 12%, 13%, 14%, 15%, 16%, 17%, 18%, 19%, 20%, 25%, 30%, 35%, 40%, 45%, 50%, 55%, 60%, 65%, 70%, 75%, 80%, 85%, 90%, 95%, 97%, 99%, or more than 100%. In some embodiments, the AAV particle encoding a payload may increase the amount of GCase protein in a tissue to be comparable to (e.g., approximately the same as) the amount of GCase protein in the corresponding tissue of a healthy subject. In some embodiments, the AAV particle encoding a payload may increase the amount of GCase protein in a tissue effective to reduce one or more symptoms of a disease associated with decreased GCase protein expression or a deficiency in the quantity and/or function of GCase protein.

[0843] In some embodiments, the AAV particles and AAV vector genomes described herein, upon administration to subject or introduction to a target cell, increase GBA activity 2-3 fold over baseline GBA activity. In the case of subjects or target cells with deficient GBA activity, as in the case of subjects having a GBA-related disorder or cells or tissues harboring a mutation in a GBA gene, the AAV particles and AAV vector genomes described herein restore GBA activity to normal levels, as defined by GBA activity levels in subjects, tissues, and cells not afflicted with a GBA-related disorder or not harboring a GBA gene mutation. In some embodiments, the AAV particles and AAV vector genomes described herein effectively reduce α-synuclein levels in subjects having a GBA-related disorder or cells or tissues harboring a mutation in a GBA gene. In some embodiments, the AAV particles and AAV vector genomes described herein effectively prevent α-synuclein mediated pathology.

### Therapeutic Applications

[0844] The present disclosure additionally provides methods for treating non-infectious diseases and/or disorders in a mammalian subject, including a human subject, comprising administering to the subject any of the AAV particles or pharmaceutical compositions described herein. In some embodiments, non-infectious diseases and/or disorders treated according to the methods described herein include, but are not limited to, Parkinson's Disease (PD) (e.g., PD associated with a mutation in a GBA gene), Dementia with Lewy Bodies (DLB), Multiple System Atrophy (MSA), Decreased muscle mass, Spinal muscular atrophy (SMA), Alzheimer's disease (AD), Amyotrophic lateral sclerosis (ALS), Huntington's Disease (HD), Multiple sclerosis (MS), Stroke, Migraine, Pain, Neuropathies, Psychiatric disorders including schizophrenia, bipolar disorder, and autism, Cancer, ocular diseases, systemic diseases of the blood, heart and bone, Immune system and Autoimmune diseases and Inflammatory diseases.

[0845] The present disclosure provides a method for administering to a subject in need thereof, including a human subject, a therapeutically effective amount of the AAV particles of the invention to slow, stop or reverse disease progression. As a non-limiting example, disease progression may be measured by tests or diagnostic tool(s) known to those skilled in the art. As another non-limiting example, disease progression may be measured by change in the pathological features of the brain, CSF, or other tissues of the subject.

### Gaucher Disease

[0846] Homozygous or compound heterozygous GBA mutations lead to Gaucher disease (“GD”). See Sardi, S. Pablo, Jesse M. Cedarbaum, and Patrik Brundin. Movement Disorders 33.5 (2018): 684-696, the contents of which are incorporated by reference in their entirety. Gaucher disease is one of the most prevalent lysosomal storage disorders, with an estimated standardized birth incidence in the general population of between 0.4 to 5.8 individuals per 100,000. Heterozygous GBA mutations can lead to PD. Indeed, GBA mutations occur in 7-10% of total PD patients, making GBA mutations the most important genetic risk factor of PD. PD-GBA patients have reduced levels of lysosomal enzyme beta-glucocerebrosidase (GCase), which results in increased accumulations of glycosphingolipid glucosylceramide (GluCer), which in turn is correlated with exacerbated α-Synuclein aggregation and concomitant neurological symptoms. Gaucher disease and PD, as well as other lysosomal storage disorders including Lewy body dieseases such as Dementia with Lewy Bodies, and related diseases, in some cases, share common etiology in the GBA gene. See Sidransky, E. and Lopez, G. Lancet Neurol. 2012 November; 11(11): 986-998, the contents of which are incorporated by reference in their entirety.

[0847] Gaucher disease can present as GD1 (Type 1 GD), which is the most common type of Gaucher disease among Asheknazi Jewish populations. In some embodiments, a Type I GD is a non-neuronopathic GD (e.g., does not affect the CNS, e.g., impacts cells and tissues outside of the CNS, e.g., a peripheral cell or tissue, e.g., a heart tissue, a liver tissue, a spleen tissue, or a combination thereof). The carrier frequency among Ashkenazi Jewish populations is approximately 1 in 12 individuals. GD2 (Type 2 GD) is characterized by acute neuronopathic GD (e.g., affects the CNS, e.g., cells and tissues of the brain, spinal cord, or both), and has an estimated incidence of 1 in 150,000 live births. GD2 is an early onset disease, typically presenting at about 1 year of age. Visceral involvement is extensive and severe, with numerous attributes of CNS disease, including oculomotor dysfunction, and bulbar palsy and generalized weakness, and progressive development delay. GD2 progresses to severe hypertonia, rigidity, opisthotonos, dysphagia, and seizures, typically resulting in death before age 2. GD3 (type 3 GD) is characterized by sub-acute neuropathic GD and as an estimated incidence of 1 in 200,000 live births. GD3 typically presents with pronounced neurologic signs, including a characteristic mask-like face, strabismus, supranuclear gaze palsy, and poor upward gaze initiation. GD2 and GD3 are each further characterized as associated with progressive encephalopathy, with developmental delay, cognitive impairment, progressive dementia, ataxia, myoclonus, and various gaze palsies. GD1, on the other hand, can have variable etiology, with visceromegaly, marrow and skeletal and pulmonary pathology, bleeding diatheses, and developmental delay. GD is further associated with increased rates of hematologic malignancies.

[0848] Deficiency of Glucocerebrosidase (GCase) is the underlying mechanism of GD. Low GCase activity leads to accumulation of glucocerebroside and other glycolipids within the lysosomes of macrophages. Accumulation can amount to about 20-fold to about 100-fold higher than in control cells or subjects without GCase deficiency. Pathologic lipid accumulation in macrophages accounts for <2% of additional tissue mass observed in the liver and spleen of GD patients. Additional increase in organ weight and volume is attributed to an inflammatory and hyperplastic cellular response.

[0849] Current treatments of GD include administration of recombinant enzymes, imiglucerase, taliglucerase alfa, and velaglucerase alfa. However, these intravenous enzyme therapies do not cross the blood brain barrier (BBB), and are not suitable for treatment of GD with Parkinson's disease or other neuronopathic forms of GD.

### Parkinson's Disease

[0850] Parkinson's Disease (PD) is a progressive disorder of the nervous system affecting especially the substantia nigra of the brain. PD develops as a result of the loss of dopamine producing brain cells. Typical early symptoms of PD include shaking or trembling of a limb, e.g. hands, arms, legs, feet and face. Additional characteristic symptoms are stiffness of the limbs and torso, slow movement or an inability to move, impaired balance and coordination, cognitional changes, and psychiatric conditions e.g. depression and visual hallucinations. PD has both familial and idiopathic forms and it is suggestion to be involved with genetic and environmental causes. PD affects more than 4 million people worldwide. In the US, approximately 60,000 cases are identified annually. Generally PD begins at the age of 50 or older. An early-onset form of the condition begins at age younger than 50, and juvenile-onset PD begins before age of 20.

[0851] Death of dopamine producing brain cells related to PD has been associated with aggregation, deposition and dysfunction of alpha-synuclein protein (see, e.g. Marques and Outeiro, 2012, Cell Death Dis. 3:e350, Jenner, 1989, J Neurol Neurosurg Psychiatry. Special Supplement, 22-28, and references therein). Studies have suggested that alpha-synuclein has a role in presynaptic signaling, membrane trafficking and regulation of dopamine release and transport. Alpha-synuclein aggregates, e.g. in forms of oligomers, have been suggested to be species responsible for neuronal dysfunction and death. Mutations of the alpha-synuclein gene (SNCA) have been identified in the familial forms of PD, but also environmental factors, e.g. neurotoxin affect alpha-synuclein aggregation. Other suggested causes of brain cell death in PD are dysfunction of proteasomal and lysosomal systems, reduced mitochondrial activity.

[0852] PD is related to other diseases related to alpha-synuclein aggregation, referred to as “synucleinopathies.” Such diseases include, but are not limited to, Parkinson's Disease Dementia (PDD), multiple system atrophy (MSA), dementia with Lewy bodies, juvenile-onset generalized neuroaxonal dystrophy (Hallervorden-Spatz disease), pure autonomic failure (PAF), neurodegeneration with brain iron accumulation type-1 (NBIA-1) and combined Alzheimer's and Parkinson's disease.

[0853] As of today, no cure or prevention therapy for PD has been identified. A variety of drug therapies available provide relief to the symptoms. Non-limiting examples of symptomatic medical treatments include carbidopa and levodoba combination reducing stiffness and slow movement, and anticholinergics to reduce trembling and stiffness. Other optional therapies include e.g. deep brain stimulation and surgery. There remains a need for therapy affecting the underlying pathophysiology. For example, antibodies targeting alpha-synuclein protein, or other proteins relevant for brain cell death in PD, may be used to prevent and/or treat PD.

[0854] In some embodiment, methods of the present invention may be used to treat subjects suffering from PD (e.g., PD associated with a mutation in a GBA gene) and other synucleinopathies. In some cases, methods of the present invention may be used to treat subjects suspected of developing PD (e.g., a PD associated with a mutation in a GBA gene) and other synucleinopathies.

[0855] AAV Particles and methods of using the AAV particles described herein may be used to prevent, manage and/or treat PD, e.g., a PD associated with a mutation in a GBA gene.

[0856] Approximately 5% of PD patients carry a GBA mutation: 10% of patients with type 1 GD develop PD before the age of 80 years, compared to about 3-4% in the normal population. Additionally, heterozygous or homozygous GBA mutations have been shown to increase the risk of PD 20-30 fold.

Dementia with Lewy Bodies

[0857] Dementia with Lewy Bodies (DLB), also known as diffuse Lewy body disease, is a form of progressive dementia, characterized by cognitive decline, fluctuating alertness and attention, visual hallucinations and parkinsonian motor symptoms. DLB may be inherited by an autosomal dominant pattern. DLB affects more than 1 million individuals in the US. The condition typically shows symptoms at the age of 50 or older.

[0858] DLB is caused by the abnormal build-up of Lewy bodies, aggregates of the alpha-synuclein protein, in the cytoplasm of neurons in the brain areas controlling memory and motor control. The pathophysiology of these aggregates is very similar to aggregates observed in Parkinson's disease and DLB also has similarities to Alzheimer's disease. Inherited DLB has been associated with gene mutations in GBAs.

[0859] As of today, there is no cure or prevention therapy for DLB. A variety of drug therapies available are aimed at managing the cognitive, psychiatric and motor control symptoms of the condition. Non-limiting examples of symptomatic medical treatments include e.g. acetylcholinesterase inhibitors to reduce cognitive symptoms, and levodopa to reduce stiffness and loss of movement. There remains a need for therapy affecting the underlying pathophysiology.

[0860] In some embodiments, methods of the present disclosure may be used to treat subjects suffering from DLB (e.g., a DLB associated with a mutation in a GBA gene). In some cases, the methods may be used to treat subjects suspected of developing DLB (e.g., a DLB associated with a mutation in a GBA gene).

[0861] AAV Particles and methods of using the AAV particles described in the present invention may be used to prevent, manage and/or treat DLB (e.g., a DLB associated with a mutation in a GBA gene).

### VI. Dosing and Administration

### Administration

[0862] In some aspects, the present disclosure provides administration and/or delivery methods for vectors and viral particles, e.g., AAV particles, encoding GCase protein or a variant thereof, for the prevention, treatment, or amelioration of diseases or disorders of the CNS. For example, administration of the AAV particles prevents, treats, or ameliorates GBA-related disorders. Thus, robust widespread GCase protein distribution throughout the CNS and periphery is desired for maximal efficacy. Particular target tissues for administration or delivery include CNS tissues, brain tissue, and, more specifically, caudate-putamen, thalamus, superior colliculus, cortex, and corpus collosum. Particular embodiments provide administration and/or delivery of the AAV particles and AAV vector genomes described herein to caudate-putamen and/or substantia nigra. Other particular embodiments provide administration and/or delivery of the AAV particles and AAV vector genomes described herein to thalamus.

[0863] The AAV particles of the present disclosure may be administered by any route which results in a therapeutically effective outcome. These include, but are not limited to, enteral (into the intestine), gastroenteral, epidural (into the dura matter), oral (by way of the mouth), transdermal, peridural, intracerebral (into the cerebrum), intracerebroventricular (into the cerebral ventricles), intracranial (into the skull), picutaneous (application onto the skin), intradermal, (into the skin itself), subcutaneous (under the skin), nasal administration (through the nose), intravenous (into a vein), intravenous bolus, intravenous drip, intraarterial (into an artery), intramuscular (into a muscle), intracardiac (into the heart), intraosseous infusion (into the bone marrow), intraparenchymal (into the substance of), intrathecal (into the spinal canal), intraperitoneal, (infusion or injection into the peritoneum), intravesicular infusion, intravitreal, (through the eye), intracavernous injection (into a pathologic cavity) intracavitary (into the base of the penis), intravaginal administration, intrauterine, extra-amniotic administration, transdermal (diffusion through the intact skin for systemic distribution), transmucosal (diffusion through a mucous membrane), transvaginal, insufflation (snorting), sublingual, sublabial, enema, eye drops (onto the conjunctiva), in ear drops, auricular (in or by way of the ear), buccal (directed toward the cheek), conjunctival, cutaneous, dental (to a tooth or teeth), electro-osmosis, endocervical, endosinusial, endotracheal, extracorporeal, hemodialysis, infiltration, interstitial, intra-abdominal, intra-amniotic, intra-articular, intrabiliary, intrabronchial, intrabursal, intracartilaginous (within a cartilage), intracaudal (within the cauda equine), intracisternal (within the cisterna magna cerebellomedularis), intracorneal (within the cornea), dental intracoronal, intracoronary (within the coronary arteries), intracorporus cavernosum (within the dilatable spaces of the corporus cavernosa of the penis), intradiscal (within a disc), intraductal (within a duct of a gland), intraduodenal (within the duodenum), intradural (within or beneath the dura), intraepidermal (to the epidermis), intraesophageal (to the esophagus), intragastric (within the stomach), intragingival (within the gingivae), intraileal (within the distal portion of the small intestine), intralesional (within or introduced directly to a localized lesion), intraluminal (within a lumen of a tube), intralymphatic (within the lymph), intramedullary (within the marrow cavity of a bone), intrameningeal (within the meninges), intraocular (within the eye), intraovarian (within the ovary), intrapericardial (within the pericardium), intrapleural (within the pleura), intraprostatic (within the prostate gland), intrapulmonary (within the lungs or its bronchi), intrasinal (within the nasal or periorbital sinuses), intraspinal (within the vertebral column), intrasynovial (within the synovial cavity of a joint), intratendinous (within a tendon), intratesticular (within the testicle), intrathecal (within the cerebrospinal fluid at any level of the cerebrospinal axis), intrathoracic (within the thorax), intratubular (within the tubules of an organ), intratumor (within a tumor), intratympanic (within the aurus media), intravascular (within a vessel or vessels), intraventricular (within a ventricle), iontophoresis (by means of electric current where ions of soluble salts migrate into the tissues of the body), irrigation (to bathe or flush open wounds or body cavities), laryngeal (directly upon the larynx), nasogastric (through the nose and into the stomach), occlusive dressing technique (topical route administration which is then covered by a dressing which occludes the area), ophthalmic (to the external eye), oropharyngeal (directly to the mouth and pharynx), parenteral, percutaneous, periarticular, peridural, perineural, periodontal, rectal, respiratory (within the respiratory tract by inhaling orally or nasally for local or systemic effect), retrobulbar (behind the pons or behind the eyeball), soft tissue, subarachnoid, subconjunctival, submucosal, subpial, topical, transplacental (through or across the placenta), transtracheal (through the wall of the trachea), transtympanic (across or through the tympanic cavity), ureteral (to the ureter), urethral (to the urethra), vaginal, caudal block, diagnostic, nerve block, biliary perfusion, cardiac perfusion, photopheresis or spinal.

[0864] In some embodiments, AAV particles of the present disclosure are administered so as to be delivered to a target cell or tissue. Delivery to a target cell results in GCase protein expression. A target cell may be any cell in which it is considered desirable to increase GCase protein expression levels. A target cell may be a CNS cell. Non-limiting examples of such cells and/or tissues include, dorsal root ganglia and dorsal columns, proprioceptive sensory neurons, Clark's column, gracile and cuneate nuclei, cerebellar dentate nucleus, corticospinal tracts and the cells comprising the same, Betz cells, and cells of the heart.

[0865] In some embodiments, compositions may be administered in a way that allows them to cross the blood-brain barrier, vascular barrier, or other epithelial barrier.

[0866] In some embodiments, delivery of GCase protein by adeno-associated virus (AAV) particles to cells of the central nervous system (e.g., parenchyma) comprises infusion into cerebrospinal fluid (CSF). CSF is produced by specialized ependymal cells that comprise the choroid plexus located in the ventricles of the brain. CSF produced within the brain then circulates and surrounds the central nervous system including the brain and spinal cord. CSF continually circulates around the central nervous system, including the ventricles of the brain and subarachnoid space that surrounds both the brain and spinal cord, while maintaining a homeostatic balance of production and reabsorption into the vascular system. The entire volume of CSF is replaced approximately four to six times per day or approximately once every four hours, though values for individuals may vary.

[0867] In some embodiments, the AAV particles may be delivered by systemic delivery. In some embodiments, the systemic delivery may be by intravascular administration. In some embodiments, the systemic delivery may be by intravenous (IV) administration.

[0868] In some embodiments, the AAV particles may be delivered by intravenous delivery.

[0869] In some embodiments, the AAV particle is administered to the subject via focused ultrasound (FUS), e.g., coupled with the intravenous administration of microbubbles (FUS-MB), or MRI-guided FUS coupled with intravenous administration, e.g., as described in Terstappen et al. (Nat Rev Drug Discovery, https://doi.org/10.1038/s41573-021-00139-y (2021)), Burgess et al. (Expert Rev Neurother. 15(5): 477-491 (2015)), and/or Hsu et al. (PLOS One 8(2): 1-8), the contents of which are incorporated herein by reference in its entirety.

[0870] In some embodiments, the AAV particles may be delivered by injection into the CSF pathway. Non-limiting examples of delivery to the CSF pathway include intrathecal and intracerebroventricular administration.

[0871] In some embodiments, the AAV particles may be delivered by thalamic delivery.

[0872] In some embodiments, the AAV particles may be delivered by intracerebral delivery.

[0873] In some embodiments, the AAV particles may be delivered by intracardiac delivery.

[0874] In some embodiments, the AAV particles may be delivered by intracranial delivery.

[0875] In some embodiments, the AAV particles may be delivered by intra cisterna magna (ICM) delivery.

[0876] In some embodiments, the AAV particles may be delivered by direct (intraparenchymal) injection into an organ (e.g., CNS (brain or spinal cord)). In some embodiments, the intraparenchymal delivery may be to any region of the brain or CNS.

[0877] In some embodiments, the AAV particles may be delivered by intrastriatal injection.

[0878] In some embodiments, the AAV particles may be delivered into the putamen.

[0879] In some embodiments, the AAV particles may be delivered into the spinal cord.

[0880] In some embodiments, the AAV particles of the present disclosure may be administered to the ventricles of the brain.

[0881] In some embodiments, the AAV particles of the present disclosure may be administered to the ventricles of the brain by intracerebroventricular delivery.

[0882] In some embodiments, the AAV particles of the present disclosure may be administered by intramuscular delivery.

[0883] In some embodiments, the AAV particles of the present disclosure are administered by more than one route described above. As a non-limiting example, the AAV particles may be administered by intravenous delivery and thalamic delivery.

[0884] In some embodiments, the AAV particles of the present disclosure are administered by more than one route described above. As a non-limiting example, the AAV particles may be administered by intravenous delivery and intracerebral delivery.

[0885] In some embodiments, the AAV particles of the present disclosure are administered by more than one route described above. As a non-limiting example, the AAV particles may be administered by intravenous delivery and intracranial delivery.

[0886] In some embodiments, the AAV particles of the present disclosure are administered by more than one route described above. In some embodiments, the AAV particles of the present disclosure may be delivered by intrathecal and intracerebroventricular administration.

[0887] In some embodiments, the AAV particles may be delivered to a subject to improve and/or correct mitochondrial dysfunction.

[0888] In some embodiments, the AAV particles may be delivered to a subject to preserve neurons. The neurons may be primary and/or secondary sensory neurons. In some embodiments, AAV particles are delivered to dorsal root ganglia and/or neurons thereof.

[0889] In some embodiments, administration of the AAV particles may preserve and/or correct function in the sensory pathways.

[0890] In some embodiments, the AAV particles may be delivered via intravenous (IV), intracerebroventricular (ICV), intraparenchymal, and/or intrathecal (IT) infusion and the therapeutic agent may also be delivered to a subject via intramuscular (IM) limb infusion in order to deliver the therapeutic agent to the skeletal muscle. Delivery of AAVs by intravascular limb infusion is described by Gruntman and Flotte, Human Gene Therapy Clinical Development, 2015, 26(3), 159-164, the contents of which are herein incorporated by reference in their entirety.

[0891] In some embodiments, delivery of viral vector pharmaceutical compositions in accordance with the present disclosure to cells of the central nervous system (e.g., parenchyma) comprises a rate of delivery defined by VG/hour=mL/hour*VG/mL, wherein VG is viral genomes, VG/mL is composition concentration, and mL/hour is rate of infusion.

[0892] In some embodiments, delivery of AAV particle pharmaceutical compositions in accordance with the present disclosure to cells of the central nervous system (e.g., parenchyma) comprises infusion of up to 1 mL. In some embodiments, delivery of viral vector pharmaceutical compositions in accordance with the present disclosure to cells of the central nervous system (e.g., parenchyma) may comprise infusion of 0.0001, 0.0002, 0.001, 0.002, 0.003, 0.004, 0.005, 0.008, 0.010, 0.015, 0.020, 0.025, 0.030, 0.040, 0.050, 0.060, 0.070, 0.080, 0.090, 0.1, 0.2, 0.3, 0.4, 0.5, 0.6, 0.7, 0.8, or 0.9 mL.

[0893] In some embodiments, delivery of AAV particle pharmaceutical compositions in accordance with the present disclosure to cells of the central nervous system (e.g., parenchyma) comprises infusion of between about 1 mL to about 120 mL. In some embodiments, delivery of viral vector pharmaceutical compositions in accordance with the present disclosure to cells of the central nervous system (e.g., parenchyma) may comprise an infusion of 0.1, 1, 1.1, 1.2, 1.3, 1.4, 1.5, 1.6, 1.7, 1.8, 1.9, 2, 3, 4, 5, 6, 7, 8, 9, 10, 11, 12, 13, 14, 15, 16, 17, 18, 19, 20, 21, 22, 23, 24, 25, 26, 27, 28, 29, 30, 31, 32, 33, 34, 35, 36, 37, 38, 39, 40, 41, 42, 43, 44, 45, 46, 47, 48, 49, 50, 51, 52, 53, 54, 55, 56, 57, 58, 59, 60, 61, 62, 63, 64, 65, 66, 67, 68, 69, 70, 71, 72, 73, 74, 75, 76, 77, 78, 79, 80, 81, 82, 83, 84, 85, 86, 87, 88, 89, 90, 91, 92, 93, 94, 95, 96, 97, 98, 99, 100, 101, 102, 103, 104, 105, 106, 107, 108, 109, 110, 111, 112, 113, 114, 115, 116, 117, 118, 119, or 120 mL. In some embodiments delivery of AAV particles to cells of the central nervous system (e.g., parenchyma) comprises infusion of at least 3 mL. In some embodiments, delivery of AAV particles to cells of the central nervous system (e.g., parenchyma) consists of infusion of 3 mL. In some embodiments, delivery of AAV particles to cells of the central nervous system (e.g., parenchyma) comprises infusion of at least 10 mL. In some embodiments, delivery of AAV particles to cells of the central nervous system (e.g., parenchyma) consists of infusion of 10 mL.

[0894] In some embodiments, the volume of the AAV particle pharmaceutical composition delivered to the cells of the central nervous system (e.g., parenchyma) of a subject is 2 μl, 20 μl, 50 μl, 80 μl, 100 μl, 200 μl, 300 μl, 400 μl, 500 μl, 600 μl, 700 μl, 800 μl, 900 μl, 1000 μl, 1100 ill, 1200 μl, 1300 μl, 1400 μl, 1500 μl, 1600 μl, 1700 μl, 1800 μl, 1900 μl, 2000 μl, or more than 2000 μl.

[0895] In some embodiments, the volume of the AAV particle pharmaceutical composition delivered to a region in both hemispheres of a subject brain is 2 μl, 20 μl, 50 μl, 80 μl, 100 μl, 200 μl, 300 μl, 400 μl, 500 μl, 600 μl, 700 μl, 800 μl, 900 μl, 1000 μl, 1100 μl, 1200 μl, 1300 μl, 1400 μl, 1500 μl, 1600 μl, 1700 μl, 1800 μl, 1900 μl, 2000 μl, or more than 2000 In some embodiments, the volume delivered to a region in both hemispheres is 200 As another non-limiting example, the volume delivered to a region in both hemispheres is 900 As yet another non-limiting example, the volume delivered to a region in both hemispheres is 1800 μl.

[0896] In certain embodiments, AAV particle or viral vector pharmaceutical compositions in accordance with the present disclosure may be administered at about 10 to about 600 μl/site, about 50 to about 500 μl/site, about 100 to about 400 μl/site, about 120 to about 300 μl/site, about 140 to about 200 μl/site, or about 160 μl/site.

[0897] In some embodiments, the total volume delivered to a subject may be split between one or more administration sites e.g., 1, 2, 3, 4, 5, or more than 5 sites. In some embodiments, the total volume is split between administration to the left and right hemisphere.

### Delivery of AAV Particles

[0898] In some embodiments, the AAV particles or pharmaceutical compositions of the present disclosure may be administered or delivered using the methods for treatment of disease described in U.S. Pat. No. 8,999,948, or International Publication No. WO2014178863, the contents of which are herein incorporated by reference in their entirety.

[0899] In some embodiments, the AAV particles or pharmaceutical compositions of the present disclosure may be administered or delivered using the methods for delivering gene therapy in Alzheimer's Disease or other neurodegenerative conditions as described in US Application No. 20150126590, the contents of which are herein incorporated by reference in their entirety.

[0900] In some embodiments, the AAV particles or pharmaceutical compositions of the present disclosure may be administered or delivered using the methods for delivery of a CNS gene therapy as described in U.S. Pat. Nos. 6,436,708, and 8,946,152, and International Publication No. WO2015168666, the contents of which are herein incorporated by reference in their entirety.

[0901] In some embodiments, the AAV particles of the present disclosure may be administered or delivered using the methods for the delivery of AAV virions described in European Patent Application No. EP1857552, the contents of which are herein incorporated by reference in their entirety.

[0902] In some embodiments, the AAV particle or pharmaceutical compositions of the present disclosure may be administered or delivered using the methods for delivering proteins using AAV vectors described in European Patent Application No. EP2678433, the contents of which are herein incorporated by reference in their entirety.

[0903] In some embodiments, the viral vector encoding GCase protein may be administered or delivered using the methods for delivering DNA molecules using AAV vectors described in U.S. Pat. No. 5,858,351, the contents of which are herein incorporated by reference in their entirety.

[0904] In some embodiments, the AAV particle or pharmaceutical compositions of the present disclosure may be administered or delivered using the methods for delivering DNA to the bloodstream described in U.S. Pat. No. 6,211,163, the contents of which are herein incorporated by reference in their entirety.

[0905] In some embodiments, the viral vector encoding GCase protein may be administered or delivered using the methods for delivering AAV virions described in U.S. Pat. No. 6,325,998, the contents of which are herein incorporated by reference in their entirety.

[0906] In some embodiments, the viral vector encoding GCase protein may be administered or delivered using the methods for delivering DNA to muscle cells described in U.S. Pat. No. 6,335,011, the contents of which are herein incorporated by reference in their entirety.

[0907] In some embodiments, the viral vector encoding GCase protein may be administered or delivered using the methods for delivering DNA to muscle cells and tissues described in U.S. Pat. No. 6,610,290, the contents of which are herein incorporated by reference in their entirety.

[0908] In some embodiments, the viral vector encoding GCase protein may be administered or delivered using the methods for delivering DNA to muscle cells described in U.S. Pat. No. 7,704,492, the contents of which are herein incorporated by reference in their entirety.

[0909] In some embodiments, the viral vector encoding GCase protein may be administered or delivered using the methods for delivering a payload to skeletal muscles described in U.S. Pat. No. 7,112,321, the contents of which are herein incorporated by reference in their entirety.

[0910] In some embodiments, the AAV particle or pharmaceutical compositions of the present disclosure may be administered or delivered using the methods for delivering a payload to the central nervous system described in U.S. Pat. No. 7,588,757, the contents of which are herein incorporated by reference in their entirety.

[0911] In some embodiments, the AAV particle or pharmaceutical compositions of the present disclosure may be administered or delivered using the methods for delivering a payload described in U.S. Pat. No. 8,283,151, the contents of which are herein incorporated by reference in their entirety.

[0912] In some embodiments, the AAV particle or pharmaceutical compositions of the present disclosure may be administered or delivered using the methods for delivering a payload for the treatment of Alzheimer disease described in U.S. Pat. No. 8,318,687, the contents of which are herein incorporated by reference in their entirety.

[0913] In some embodiments, the AAV particle or pharmaceutical compositions of the present disclosure may be administered or delivered using the methods for delivering a payload described in International Patent Publication No. WO2012144446, the contents of which are herein incorporated by reference in their entirety.

[0914] In some embodiments, the AAV particle or pharmaceutical compositions of the present disclosure may be administered or delivered using the methods for delivering a payload using a glutamic acid decarboxylase (GAD) delivery vector described in International Patent Publication No. WO2001089583, the contents of which are herein incorporated by reference in their entirety.

[0915] In some embodiments, the AAV particle or pharmaceutical compositions of the present disclosure may be administered or delivered using the methods for delivering a payload to neural cells described in International Patent Publication No. WO2012057363, the contents of which are herein incorporated by reference in their entirety.

[0916] In some embodiments, the AAV particle or pharmaceutical compositions of the present disclosure may be administered or delivered using the methods for delivering a payload described in International Patent Publication No. WO2001096587, the contents of which are herein incorporated by reference in their entirety.

[0917] In some embodiments, the AAV particle or pharmaceutical compositions of the present disclosure may be administered or delivered using the methods for delivering a payload to muscle tissue described in International Patent Publication No. WO2002014487, the contents of which are herein incorporated by reference in their entirety.

[0918] In some embodiments, a catheter may be used to administer the AAV particles. In certain embodiments, the catheter or cannula may be located at more than one site in the spine for multi-site delivery. The viral particles encoding may be delivered in a continuous and/or bolus infusion. Each site of delivery may be a different dosing regimen or the same dosing regimen may be used for each site of delivery. In some embodiments, the sites of delivery may be in the cervical and the lumbar region. In some embodiments, the sites of delivery may be in the cervical region. In some embodiments, the sites of delivery may be in the lumbar region.

[0919] In some embodiments, a subject may be analyzed for spinal anatomy and pathology prior to delivery of the AAV particles described herein. As a non-limiting example, a subject with scoliosis may have a different dosing regimen and/or catheter location compared to a subject without scoliosis.

[0920] In some embodiments, the delivery method and duration is chosen to provide broad transduction in the spinal cord. In some embodiments, intrathecal delivery is used to provide broad transduction along the rostral-caudal length of the spinal cord. In some embodiments, multi-site infusions provide a more uniform transduction along the rostral-caudal length of the spinal cord.

### Delivery to Cells

[0921] In some aspects, the present disclosure provides a method of delivering to a cell or tissue any of the above-described AAV particles, comprising contacting the cell or tissue with said AAV particle or contacting the cell or tissue with a formulation comprising said AAV particle, or contacting the cell or tissue with any of the described compositions, including pharmaceutical compositions. The method of delivering the AAV particle to a cell or tissue can be accomplished in vitro, ex vivo, or in vivo.

### Delivery to Subjects

[0922] In some aspects, the present disclosure additionally provides a method of delivering to a subject, including a mammalian subject, any of the above-described AAV particles comprising administering to the subject said AAV particle, or administering to the subject a formulation comprising said AAV particle, or administering to the subject any of the described compositions, including pharmaceutical compositions.

[0923] In some embodiments, the AAV particles may be delivered to bypass anatomical blockages such as, but not limited to the blood brain barrier.

[0924] In some embodiments, the AAV particles may be formulated and delivered to a subject by a route which increases the speed of drug effect as compared to oral delivery.

[0925] In some embodiments, the AAV particles may be delivered by a method to provide uniform transduction of the spinal cord and dorsal root ganglion (DRG). In some embodiments, the AAV particles may be delivered using intrathecal infusion.

[0926] In some embodiments, a subject may be administered the AAV particles described herein using a bolus infusion. As used herein, a “bolus infusion” means a single and rapid infusion of a substance or composition.

[0927] In some embodiments, the AAV particles encoding GCase protein may be delivered in a continuous and/or bolus infusion. Each site of delivery may be a different dosing regimen or the same dosing regimen may be used for each site of delivery. As a non-limiting example, the sites of delivery may be in the cervical and the lumbar region. As another non-limiting example, the sites of delivery may be in the cervical region. As another non-limiting example, the sites of delivery may be in the lumbar region.

[0928] In some embodiments, the AAV particles may be delivered to a subject via a single route administration.

[0929] In some embodiments, the AAV particles may be delivered to a subject via a multi-site route of administration. For example, a subject may be administered the AAV particles at 2, 3, 4, 5, or more than 5 sites.

[0930] In some embodiments, a subject may be administered the AAV particles described herein using sustained delivery over a period of minutes, hours or days. The infusion rate may be changed depending on the subject, distribution, formulation or another delivery parameter known to those in the art.

[0931] In some embodiments, if continuous delivery (continuous infusion) of the AAV particles is used, the continuous infusion may be for 1 hour, 2, hours, 3 hours, 4 hours, 5 hours, 6 hours, 7 hours, 8 hours, 9 hours, 10 hours, 11 hours, 12 hours, 13 hours, 14 hours, 15 hours, 16 hours, 17 hours, 18 hours, 19 hours, 20 hours, 21 hours, 22 hours, 23 hours, 24 hours, or more than 24 hours.

[0932] In some embodiments, the intracranial pressure may be evaluated prior to administration. The route, volume, AAV particle concentration, infusion duration and/or vector titer may be optimized based on the intracranial pressure of a subject.

[0933] In some embodiments, the AAV particles may be delivered by systemic delivery. In some embodiments, the systemic delivery may be by intravascular administration.

[0934] In some embodiments, the AAV particles may be delivered by injection into the CSF pathway. Non-limiting examples of delivery to the CSF pathway include intrathecal and intracerebroventricular administration.

[0935] In some embodiments, the AAV particles may be delivered by direct (intraparenchymal) injection into the substance of an organ, e.g., one or more regions of the brain.

[0936] In some embodiments, the AAV particles may be delivered by subpial injection into the spinal cord. For example, subjects may be placed into a spinal immobilization apparatus. A dorsal laminectomy may be performed to expose the spinal cord. Guiding tubes and XYZ manipulators may be used to assist catheter placement. Subpial catheters may be placed into the subpial space by advancing the catheter from the guiding tube and AAV particles may be injected through the catheter (Miyanohara et al., Mol Ther Methods Clin Dev. 2016; 3: 16046). In some cases, the AAV particles may be injected into the cervical subpial space. In some cases, the AAV particles may be injected into the thoracic subpial space.

[0937] In some embodiments, the AAV particles may be delivered by direct injection to the CNS of a subject. In some embodiments, direct injection is intracerebral injection, intraparenchymal injection, intrathecal injection, intra-cisterna magna injection, or any combination thereof. In some embodiments, direct injection to the CNS of a subject comprises convection enhanced delivery (CED). In some embodiments, administration comprises peripheral injection. In some embodiments, peripheral injection is intravenous injection.

[0938] In some embodiments, the AAV particles may be delivered to a subject in order to increase the GCase protein levels in the caudate-putamen, thalamus, superior colliculus, cortex, and/or corpus callosum as compared to endogenous levels. The increase may be 0.1× to 5×, 0.5× to 5×, 1× to 5×, 2× to 5×, 3× to 5×, 4× to 5×, 0.1× to 4×, 0.5× to 4×, 1× to 4×, 2× to 4×, 3× to 4×, 0.1× to 3×, 0.5× to 3×, 1× to 3×, 2× to 3×, 0.1× to 2×, 0.5× to 2×, 0.1× to 1×, 0.5× to 1×, 0.1× to 0.5×, 1× to 2×, 0.1×, 0.2×, 0.3×, 0.4×, 0.5×, 0.6×, 0.7×, 0.8×, 0.9×, 1.0×, 1.1×, 1.2×, 1.3×, 1.4×, 1.5×, 1.6×, 1.7×, 1.8×, 1.9×, 2.0×, 2.1×, 2.2×, 2.3×, 2.4×, 2.5×, 2.6×, 2.7×, 2.8×, 2.9×, 3.0×, 3.1×, 3.2×, 3.3×, 3.4×, 3.5×, 3.6×, 3.7×, 3.8×, 3.9×, 4.0×, 4.1×, 4.2×, 4.3×, 4.4×, 4.5×, 4.6×, 4.7×, 4.8×, 4.9× or more than 5× as compared to endogenous levels.

[0939] In some embodiments, the AAV particles may be delivered to a subject in order to increase the GCase protein levels in the caudate, putamen, thalamus, superior colliculus, cortex, and/or corpus callosum by transducing cells in these CNS regions. Transduction may also be referred to as the amount of cells that are positive for GCase protein. The transduction may be greater than or equal to 1%, 5%, 10%, 15%, 20%, 25%, 30%, 35%, 40%, 45%, 50%, 55%, 60%, 65%, 70%, 75%, 80%, 85%, 90%, 95%, or 99% of cells in these CNS regions.

[0940] In some embodiments, delivery of AAV particles comprising a viral genome encoding GCase protein described herein to neurons in the caudate-putamen, thalamus, superior colliculus, cortex, and/or corpus callosum will lead to an increased expression of GCase protein. The increased expression may lead to improved survival and function of various cell types in these CNS regions and subsequent improvement of GBA-related disorder symptoms.

[0941] In particular embodiments, the AAV particles may be delivered to a subject in order to establish widespread distribution of the GCase throughout the nervous system by administering the AAV particles to the thalamus of the subject.

[0942] Specifically, in some embodiments, the increased expression of GCase protein may lead to improved gait, sensory capability, coordination of movement and strength, functional capacity, cognition, and/or quality of life.

### Dosing

[0943] In some aspects, the present disclosure provides methods comprising administering viral vectors and their payloads in accordance with the disclosure to a subject in need thereof. Viral vector pharmaceutical, imaging, diagnostic, or prophylactic compositions thereof, may be administered to a subject using any amount and any route of administration effective for preventing, treating, diagnosing, or imaging a disease, disorder, and/or condition (e.g., a disease, disorder, and/or condition associated with decreased GCase protein expression or a deficiency in the quantity and/or function of GCase protein). In some embodiments, the disease, disorder, and/or condition is GBA-related disorders. The exact amount required will vary from subject to subject, depending on the species, age, and general condition of the subject, the severity of the disease, the particular composition, its mode of administration, its mode of activity, and the like. Compositions in accordance with the disclosure are typically formulated in unit dosage form for ease of administration and uniformity of dosage. It will be understood, however, that the total daily usage of the compositions of the present disclosure may be decided by the attending physician within the scope of sound medical judgment. The specific therapeutically effective, prophylactically effective, or appropriate imaging dose level for any particular patient will depend upon a variety of factors including the disorder being treated and the severity of the disorder; the activity of the specific compound employed; the specific composition employed; the age, body weight, general health, sex, and diet of the patient; the time of administration, route of administration, and rate of excretion of the specific peptide(s) employed; the duration of the treatment; drugs used in combination or coincidental with the specific compound employed; and like factors well known in the medical arts.

[0944] In certain embodiments, AAV particle pharmaceutical compositions in accordance with the present disclosure may be administered at dosage levels sufficient to deliver GCase protein from about 0.0001 mg/kg to about 100 mg/kg, from about 0.001 mg/kg to about 0.05 mg/kg, from about 0.005 mg/kg to about 0.05 mg/kg, from about 0.001 mg/kg to about 0.005 mg/kg, from about 0.05 mg/kg to about 0.5 mg/kg, from about 0.01 mg/kg to about 50 mg/kg, from about 0.1 mg/kg to about 40 mg/kg, from about 0.5 mg/kg to about 30 mg/kg, from about 0.01 mg/kg to about 10 mg/kg, from about 0.1 mg/kg to about 10 mg/kg, or from about 1 mg/kg to about 25 mg/kg, of subject body weight per day, one or more times a day, to obtain the desired therapeutic, diagnostic, prophylactic, or imaging effect. It will be understood that the above dosing concentrations may be converted to VG or viral genomes per kg or into total viral genomes administered by one of skill in the art.

[0945] In certain embodiments, the desired dosage may be delivered using multiple administrations (e.g., two, three, four, five, six, seven, eight, nine, ten, eleven, twelve, thirteen, fourteen, or more administrations). When multiple administrations are employed, split dosing regimens such as those described herein may be used. As used herein, a “split dose” is the division of single unit dose or total daily dose into two or more doses, e.g., two or more administrations of the single unit dose. As used herein, a “single unit dose” is a dose of any therapeutic composition administered in one dose/at one time/single route/single point of contact, i.e., single administration event. In some embodiments, a single unit dose is provided as a discrete dosage form (e.g., a tablet, capsule, patch, loaded syringe, vial, etc.). As used herein, a “total daily dose” is an amount given or prescribed in 24-hour period. It may be administered as a single unit dose. The viral particles may be formulated in buffer only or in a formulation described herein.

[0946] A pharmaceutical composition described herein can be formulated into a dosage form described herein, such as a topical, intranasal, pulmonary, intratracheal, or injectable (e.g., intravenous, intraocular, intravitreal, intramuscular, intracardiac, intraperitoneal, and/or subcutaneous).

[0947] In some embodiments, delivery of the AAV particles described herein results in minimal serious adverse events (SAEs) as a result of the delivery of the AAV particles.

[0948] In some embodiments, delivery of AAV particle pharmaceutical compositions in accordance with the present disclosure to cells of the central nervous system (e.g., parenchyma) may comprise a total concentration between about 1×10⁶ VG/mL and about 1×10¹⁶ VG/mL. In some embodiments, delivery may comprise a composition concentration of about 1×10⁶, 2×10⁶, 3×10⁶, 4×10⁶, 5×10⁶, 6×10⁶, 7×10⁶, 8×10⁶, 9×10⁶, 1×10⁷, 2×10⁷, 3×10⁷, 4×10⁷, 5×10⁷, 6×10⁷, 7×10⁷, 8×10⁷, 9×10⁷, 1×10⁸, 2×10⁸, 3×10⁸, 4×10⁸, 5×10⁸, 6×10⁸, 7×10⁸, 8×10⁸, 9×10⁸, 1×10⁹, 2×10⁹, 3×10⁹, 4×10⁹, 5×10⁹, 6×10⁹, 7×10⁹, 8×10⁹, 9×10⁹, 1×10¹⁰, 2×10¹⁰, 3×10¹⁰, 4×10¹⁰, 5×10¹⁰, 6×10¹⁰, 7×10¹⁰, 8×10¹⁰, 9×10¹⁰, 1×10¹¹, 1.6×10¹¹, 1.8×10¹¹, 2×10¹¹, 3×10¹¹, 4×10¹¹, 5×10¹¹, 5.5×10¹¹, 6×10¹¹, 7×10¹¹, 8×10¹¹, 9×10¹¹, 0.8×10¹², 0.83×10¹², 1×10¹², 1.1×10¹², 1.2×10¹², 1.3×10¹², 1.4×10¹², 1.5×10¹², 1.6×10¹², 1.7×10¹², 1.8×10¹², 1.9×10¹², 2×10¹², 2.1×10¹², 2.2×10¹², 2.3×10¹², 2.4×10¹², 2.5×10¹², 2.6×10¹², 2.7×10¹², 2.8×10¹², 2.9×10¹², 3×10¹², 3.1×10¹², 3.2×10¹², 3.3×10¹², 3.4×10¹², 3.5×10¹², 3.6×10¹², 3.7×10¹², 3.8×10¹², 3.9×10¹², 4×10¹², 4.1×10¹², 4.2×10¹², 4.3×10¹², 4.4×10¹², 4.5×10¹², 4.6×10¹², 4.7×10¹², 4.8×10¹², 4.9×10¹², 5×10¹², 6×10¹², 7×10¹², 8×10¹², 9×10¹², 1×10¹³, 2×10¹³, 2.3×10¹³, 3×10¹³, 4×10¹³, 5×10¹³, 6×10¹³, 7×10¹³, 8×10¹³, 9×10¹³, 1×10¹⁴, 1.9×10¹⁴, 2×10¹⁴, 3×10¹⁴, 4×10¹⁴, 5×10¹⁴, 6×10¹⁴, 7×10¹⁴, 8×10¹⁴, 9×10¹⁴, 1×10¹⁵, 2×10¹⁵, 3×10¹⁵, 4×10¹⁵, 5×10¹⁵, 6×10¹⁵, 7×10¹⁵, 8×10¹⁵, 9×10¹⁵, or 1×10¹⁶ VG/mL. In some embodiments, the concentration of the viral vector in the composition is 1×10¹³ VG/mL. In some embodiments, the concentration of the viral vector in the composition is 1.1×10¹² VG/mL. In some embodiments, the concentration of the viral vector in the composition is 3.7×10¹² VG/mL. In some embodiments, the concentration of the viral vector in the composition is 8×10¹¹ VG/mL. In some embodiments, the concentration of the viral vector in the composition is 2.6×10¹² VG/mL. In some embodiments, the concentration of the viral vector in the composition is 4.9×10¹² VG/mL. In some embodiments, the concentration of the viral vector in the composition is 0.8×10¹² VG/mL. In some embodiments, the concentration of the viral vector in the composition is 0.83×10¹² VG/mL. In some embodiments, the concentration of the viral vector in the composition is the maximum final dose which can be contained in a vial. In some embodiments, the concentration of the viral vector in the composition is 1.6×10¹¹ VG/mL. In some embodiments, the concentration of the viral vector in the composition is 5×10¹¹ VG/mL. In some embodiments, the concentration of the viral vector in the composition is 2.3×10¹³ VG/mL. In some embodiments, the concentration of the viral vector in the composition is 1.9×10¹⁴ VG/mL.

[0949] In some embodiments, delivery of AAV particle pharmaceutical compositions in accordance with the present disclosure to cells of the central nervous system (e.g., parenchyma) may comprise a total concentration per subject between about 1×10⁶ VG and about 1×10¹⁶ VG. In some embodiments, delivery may comprise a composition concentration of about 1×10⁶, 2×10⁶, 3×10⁶, 4×10⁶, 5×10⁶, 6×10⁶, 7×10⁶, 8×10⁶, 9×10⁶, 1×10⁷, 2×10⁷, 3×10⁷, 4×10⁷, 5×10⁷, 6×10⁷, 7×10⁷, 8×10⁷, 9×10⁷, 1×10⁸, 2×10⁸, 3×10⁸, 4×10⁸, 5×10⁸, 6×10⁸, 7×10⁸, 8×10⁸, 9×10⁸, 1×10⁹, 2×10⁹, 3×10⁹, 4×10⁹, 5×10⁹, 6×10⁹, 7×10⁹, 8×10⁹, 9×10⁹, 1×10¹⁰, 2×10¹⁰, 3×10¹⁰, 4×10¹⁰, 5×10¹⁰, 6×10¹⁰, 7×10¹⁰, 8×10¹⁰, 9×10¹⁰, 1×10¹¹, 1.6×10¹¹, 2×10¹¹, 2.1×10¹¹, 2.2×10¹¹, 2.3×10¹¹, 2.4×10¹¹, 2.5×10¹¹, 2.6×10¹¹, 2.7×10¹¹, 2.8×10¹¹, 2.9×10¹¹, 3×10¹¹, 4×10¹¹, 4.6×10¹¹, 5×10¹¹, 6×10¹¹, 7×10¹¹, 7.1×10¹¹, 7.2×10¹¹, 7.3×10¹¹, 7.4×10¹¹, 7.5×10¹¹, 7.6×10¹¹, 7.7×10¹¹, 7.8×10¹¹, 7.9×10¹¹, 8×10¹¹, 9×10¹¹, 1×10¹², 1.1×10¹², 1.2×10¹², 1.3×10¹², 1.4×10¹², 1.5×10¹², 1.6×10¹², 1.7×10¹², 1.8×10¹², 1.9×10¹², 2×10¹², 2.3×10¹², 3×10¹², 4×10¹², 4.1×10¹², 4.2×10¹², 4.3×10¹², 4.4×10¹², 4.5×10¹², 4.6×10¹², 4.7×10¹², 4.8×10¹², 4.9×10¹², 5×10¹², 6×10¹², 7×10¹², 8×10¹², 8.1×10¹², 8.2×10¹², 8.3×10¹², 8.4×10¹², 8.5×10¹², 8.6×10¹², 8.7×10¹², 8.8×10¹², 8.9×10¹², 9×10¹², 1×10¹³, 2×10¹³, 3×10¹³, 4×10¹³, 5×10¹³, 6×10¹³, 7×10¹³, 8×10¹³, 9×10¹³, 1×10¹⁴, 2×10¹⁴, 3×10¹⁴, 4×10¹⁴, 5×10¹⁴, 6×10¹⁴, 7×10¹⁴, 8×10¹⁴, 9×10¹⁴, 1×10¹⁵, 2×10¹⁵, 3×10¹⁵, 4×10¹⁵, 5×10¹⁵, 6×10¹⁵, 7×10¹⁵, 8×10¹⁵, 9×10¹⁵, or 1×10¹⁶ VG/subject. In some embodiments, the concentration of the viral vector in the composition is 2.3×10¹¹ VG/subject. In some embodiments, the concentration of the viral vector in the composition is 7.2×10¹¹ VG/subject. In some embodiments, the concentration of the viral vector in the composition is 7.5×10¹¹ VG/subject. In some embodiments, the concentration of the viral vector in the composition is 1.4×10¹² VG/subject. In some embodiments, the concentration of the viral vector in the composition is 4.8×10¹² VG/subject. In some embodiments, the concentration of the viral vector in the composition is 8.8×10¹² VG/subject. In some embodiments, the concentration of the viral vector in the composition is 2.3×10¹² VG/subject. In some embodiments, the concentration of the viral vector in the composition is 2×10¹⁰ VG/subject. In some embodiments, the concentration of the viral vector in the composition is 1.6×10¹¹ VG/subject. In some embodiments, the concentration of the viral vector in the composition is 4.6×10¹¹ VG/subject.

[0950] In some embodiments, delivery of AAV particles to cells of the central nervous system (e.g., parenchyma) may comprise a total dose between about 1×10⁶ VG and about 1×10¹⁶ VG. In some embodiments, delivery may comprise a total dose of about 1×10⁶, 2×10⁶, 3×10⁶, 4×10⁶, 5×10⁶, 6×10⁶, 7×10⁶, 8×10⁶, 9×10⁶, 1×10⁷, 2×10⁷, 3×10⁷, 4×10⁷, 5×10⁷, 6×10⁷, 7×10⁷, 8×10⁷, 9×10⁷, 1×10⁸, 2×10⁸, 3×10⁸, 4×10⁸, 5×10⁸, 6×10⁸, 7×10⁸, 8×10⁸, 9×10⁸, 1×10⁹, 2×10⁹, 3×10⁹, 4×10⁹, 5×10⁹, 6×10⁹, 7×10⁹, 8×10⁹, 9×10⁹, 1×10¹⁰, 1.9×10¹⁰, 2×10¹⁰, 3×10¹⁰, 3.73×10¹⁰, 4×10¹⁰, 5×10¹⁰, 6×10¹⁰, 7×10¹⁰, 8×10¹⁰, 9×10¹⁰, 1×10¹¹, 2×10¹¹, 2.5×10¹¹, 3×10¹¹, 4×10¹¹, 5×10¹¹, 6×10¹¹, 7×10¹¹, 8×10¹¹, 9×10¹¹, 1×10¹², 2×10¹², 3×10¹², 4×10¹², 5×10¹², 6×10¹², 7×10¹², 8×10¹², 9×10¹², 1×10¹³, 2×10¹³, 3×10¹³, 4×10¹³, 5×10¹³, 6×10¹³, 7×10¹³, 8×10¹³, 9×10¹³, 1×10¹⁴, 2×10¹⁴, 3×10¹⁴, 4×10¹⁴, 5×10¹⁴, 6×10¹⁴, 7×10¹⁴, 8×10¹⁴, 9×10¹⁴, 1×10¹⁵, 2×10¹⁵, 3×10¹⁵, 4×10¹⁵, 5×10¹⁵, 6×10¹⁵, 7×10¹⁵, 8×10¹⁵, 9×10¹⁵, or 1×10¹⁶ VG. In some embodiments, the total dose is 1×10¹³ VG. In some embodiments, the total dose is 3×10¹³ VG. In some embodiments, the total dose is 3.73×10¹⁰ VG. In some embodiments, the total dose is 1.9×10¹⁰ VG. In some embodiments, the total dose is 2.5×10¹¹ VG. In some embodiments, the total dose is 5×10¹¹ VG. In some embodiments, the total dose is 1×10¹² VG. In some embodiments, the total dose is 5×10¹² VG.

### Combinations

[0951] The AAV particles may be used in combination with one or more other therapeutic, prophylactic, diagnostic, or imaging agents. The phrase “in combination with,” is not intended to require that the agents must be administered at the same time and/or formulated for delivery together, although these methods of delivery are within the scope of the present disclosure. Compositions can be administered concurrently with, prior to, or subsequent to, one or more other desired therapeutics or medical procedures. In general, each agent will be administered at a dose and/or on a time schedule determined for that agent. In some embodiments, the present disclosure encompasses the delivery of pharmaceutical, prophylactic, diagnostic, or imaging compositions in combination with agents that may improve their bioavailability, reduce and/or modify their metabolism, and/or modify their distribution within the body.

[0952] The therapeutic agents may be approved by the US Food and Drug Administration or may be in clinical trial or at the preclinical research stage. The therapeutic agents may utilize any therapeutic modality known in the art, with non-limiting examples including gene silencing or interference (i.e., miRNA, siRNA, RNAi, shRNA), gene editing (i.e., TALEN, CRISPR/Cas9 systems, zinc finger nucleases), and gene, protein or enzyme replacement.

### Measurement of Expression

[0953] Expression of GCase protein from viral genomes may be determined using various methods known in the art such as, but not limited to immunochemistry (e.g., IHC), enzyme-linked immunosorbent assay (ELISA), affinity ELISA, ELISPOT, flow cytometry, immunocytology, surface plasmon resonance analysis, kinetic exclusion assay, liquid chromatography-mass spectrometry (LCMS), high-performance liquid chromatography (HPLC), BCA assay, immunoelectrophoresis, Western blot, SDS-PAGE, protein immunoprecipitation, PCR, and/or in situ hybridization (ISH). In some embodiments, transgenes encoding GCase protein delivered in different AAV capsids may have different expression levels in different CNS tissues.

[0954] In certain embodiments, the GCase protein is detectable by Western blot.

[0955] Alternatively methods of detecting GBA expression are known, including, for example, use of the methods and compounds as described in Int'l Pub. No. WO2019136484, incorporated herein by reference in its entirety.

### VII. Kits and Devices

### Kits

[0956] In some aspects, the present disclosure provides a variety of kits for conveniently and/or effectively carrying out methods of the present disclosure. Typically, kits will comprise sufficient amounts and/or numbers of components to allow a user to perform multiple treatments of a subject(s) and/or to perform multiple experiments.

[0957] Any of the vectors, constructs, or GCase proteins of the present disclosure may be comprised in a kit. In some embodiments, kits may further include reagents and/or instructions for creating and/or synthesizing compounds and/or compositions of the present disclosure. In some embodiments, kits may also include one or more buffers. In some embodiments, kits of the disclosure may include components for making protein or nucleic acid arrays or libraries and thus, may include, for example, solid supports.

[0958] In some embodiments, kit components may be packaged either in aqueous media or in lyophilized form. The container means of the kits will generally include at least one vial, test tube, flask, bottle, syringe or other container means, into which a component may be placed, and suitably aliquoted. Where there is more than one kit component, (labeling reagent and label may be packaged together), kits may also generally contain second, third or other additional containers into which additional components may be separately placed. In some embodiments, kits may also comprise second container means for containing sterile, pharmaceutically acceptable buffers and/or other diluents. In some embodiments, various combinations of components may be comprised in one or more vial. Kits of the present disclosure may also typically include means for containing compounds and/or compositions of the present disclosure, e.g., proteins, nucleic acids, and any other reagent containers in close confinement for commercial sale. Such containers may include injection or blow-molded plastic containers into which desired vials are retained.

[0959] In some embodiments, kit components are provided in one and/or more liquid solutions. In some embodiments, liquid solutions are aqueous solutions, with sterile aqueous solutions being particularly used. In some embodiments, kit components may be provided as dried powder(s). When reagents and/or components are provided as dry powders, such powders may be reconstituted by the addition of suitable volumes of solvent. In some embodiments, it is envisioned that solvents may also be provided in another container means. In some embodiments, labeling dyes are provided as dried powders. In some embodiments, it is contemplated that 10, 20, 30, 40, 50, 60, 70, 80, 90, 100, 120, 120, 130, 140, 150, 160, 170, 180, 190, 200, 300, 400, 500, 600, 700, 800, 900, 1000 micrograms or at least or at most those amounts of dried dye are provided in kits of the disclosure. In such embodiments, dye may then be resuspended in any suitable solvent, such as DMSO.

[0960] In some embodiments, kits may include instructions for employing kit components as well the use of any other reagent not included in the kit. Instructions may include variations that may be implemented.

### Devices

[0961] In some embodiments, compounds and/or compositions of the present disclosure may be combined with, coated onto or embedded in a device. Devices may include, but are not limited to, dental implants, stents, bone replacements, artificial joints, valves, pacemakers and/or other implantable therapeutic device.

[0962] The present disclosure provides for devices which may incorporate viral vectors that encode one or more GCase protein molecules. These devices contain in a stable formulation the viral vectors which may be immediately delivered to a subject in need thereof, such as a human patient.

[0963] Devices for administration may be employed to deliver the viral vectors encoding GCase protein of the present disclosure according to single, multi- or split-dosing regimens taught herein.

[0964] Method and devices known in the art for multi-administration to cells, organs and tissues are contemplated for use in conjunction with the methods and compositions disclosed herein as embodiments of the present disclosure.

### VIII. Definitions

[0965] At various places in the present specification, substituents of compounds of the present disclosure are disclosed in groups or in ranges. It is specifically intended that the present disclosure include each and every individual sub-combination of the members of such groups and ranges. The following is a non-limiting list of term definitions.

[0966] Adeno-associated virus: As used herein, the term “adeno-associated virus” or “AAV” refers to members of the dependovirus genus or a variant, e.g., a functional variant, thereof. In some embodiments, the AAV is wildtype, or naturally occurring. In some embodiments, the AAV is recombinant.

[0967] AAV Particle: As used herein, an “AAV particle” refers to a particle or a virion comprising an AAV capsid, e.g., an AAV capsid variant, and a polynucleotide, e.g., a viral genome or a vector genome. In some embodiments, the viral genome of the AAV particle comprises at least one payload region and at least one ITR. In some embodiments, an AAV particle of the disclosure is an AAV particle comprising an AAV capsid polypeptide, e.g., a parent capsid sequence with at least one peptide, e.g., targeting peptide, insert. In some embodiments, the AAV particle is capable of delivering a nucleic acid, e.g., a payload region, encoding a payload to cells, typically, mammalian, e.g., human, cells. In some embodiments, an AAV particle of the present disclosure may be produced recombinantly. In some embodiments, an AAV particle may be derived from any serotype, described herein or known in the art, including combinations of serotypes (e.g., “pseudotyped” AAV) or from various genomes (e.g., single stranded or self-complementary). In some embodiments, the AAV particle may be replication defective and/or targeted. In some embodiments, the AAV particle may comprises a peptide, e.g., targeting peptide, present, e.g., inserted into, the capsid to enhance tropism for a desired target tissue. It is to be understood that reference to the AAV particle of the disclosure also includes pharmaceutical compositions thereof, even if not explicitly recited.

[0968] Active Ingredient: As used herein, the term “active ingredient” refers to a molecule or complex thereof that is biologically active and responsible for a generating a biological effect. The active ingredient in a pharmaceutical composition may be referred to as an active pharmaceutical ingredient. For the purposes of the present disclosure, the phrase “active ingredient” generally refers either to the viral particle carrying the payload or to the payload (or its gene product) delivered by the viral particle as described herein. In contrast, an “inactive ingredient” refers to a substance which is biologically inert. An excipient is an example of an inactive ingredient.

[0969] Administered in combination: As used herein, the term “administered in combination” or “delivered in combination” or “combined administration” refers to exposure of two or more agents (e.g., AAV) administered at the same time or within an interval such that the subject is at some point in time exposed to both agents and/or such that there is an overlap in the effect of each agent on the patient. In some embodiments, at least one dose of one or more agents is administered within about 24 hours, 12 hours, 6 hours, 3 hours, 1 hour, 30 minutes, 15 minutes, 10 minutes, 5 minutes, or 1 minute of at least one dose of one or more other agents. In some embodiments, administration occurs in overlapping dosage regimens. As used herein, the term “dosage regimen” refers to a plurality of doses spaced apart in time. Such doses may occur at regular intervals or may include one or more hiatuses in administration. In some embodiments, the administration of individual doses of one or more compounds and/or compositions of the present disclosure, as described herein, are spaced sufficiently closely together such that a combinatorial (e.g., a synergistic) effect is achieved.

[0970] Amelioration: As used herein, the term “amelioration” or “ameliorating” refers to a lessening of severity of at least one indicator of a condition or disease. For example, in the context of a neurodegenerative disorder, amelioration includes the reduction or stabilization of neuron loss.

[0971] Animal: As used herein, the term “animal” refers to any member of the animal kingdom. In some embodiments, the terms subject or animal refers to humans at any stage of development. In some embodiments, animal refers to non-human animals at any stage of development. In certain embodiments, the non-human animal is a mammal (e.g., a rodent, a mouse, a rat, a rabbit, a monkey, a dog, a cat, a sheep, cattle, a primate, or a pig). In some embodiments, animals include, but are not limited to, mammals, birds, reptiles, amphibians, fish, and worms. In some embodiments, the animal is a transgenic animal, genetically-engineered animal, or a clone.

[0972] Approximately: As used herein, the term “approximately” or “about,” as applied to one or more values of interest, refers to a value that is similar to a stated reference value. In certain embodiments, the term “approximately” or “about” refers to a range of values that fall within 25%, 20%, 19%, 18%, 17%, 16%, 15%, 14%, 13%, 12%, 11%, 10%, 9%, 8%, 7%, 6%, 5%, 4%, 3%, 2%, 1%, 0.5%, 0.25%, 0.1%, or less in either direction (greater than or less than) of the stated reference value unless otherwise stated or otherwise evident from the context (except where such number would exceed 100% of a possible value).

[0973] Biologically active: As used herein, the phrase “biologically active” refers to a characteristic of any substance (e.g., an AAV) that has activity in or on a biological system and/or organism. For instance, a substance that, when administered to an organism, has a biological effect on that organism, is considered to be biologically active. In particular embodiments, a compound, and/or a composition of the present disclosure may be considered biologically active if even a portion of it is biologically active or mimics an activity considered to be biologically relevant. In some embodiments, biological activity refers to inducing expression of GCase protein or a variant thereof. In some embodiments, biological activity refers to preventing and/or treating a disease associated with decreased GCase protein expression or a deficiency in the quantity and/or function of GCase protein. In some embodiments, biological activity refers to preventing and/or treating disorders associated with reduced GBA gene expression, including, for example, Parkinson Disease (PD) and related disorders, including Gaucher Disease, and Dementia with Lewy Bodies (collectively, “GBA-related disorders”).

[0974] Biological system: As used herein, the term “biological system” refers to a group of organs, tissues, cells, intracellular components, proteins, nucleic acids, molecules (including, but not limited to biomolecules) that function together to perform a certain biological task within cellular membranes, cellular compartments, cells, tissues, organs, organ systems, multicellular organisms, or any biological entity. In some embodiments, biological systems are cell signaling pathways comprising intracellular and/or extracellular cell signaling biomolecules. In some embodiments, biological systems comprise growth factor signaling events within the extracellular/cellular matrix and/or cellular niches.

[0975] Capsid: As used herein, the term “capsid” refers to the exterior, e.g., a protein shell, of a virus particle, e.g., an AAV particle, that is substantially (e.g., >50%, >60%, >70%, >80%, >90%, >95%, >99%, or 100%) protein. In some embodiments, the capsid is an AAV capsid comprising an AAV capsid protein described herein, e.g., a VP1, VP2, and/or VP3 polypeptide. The AAV capsid protein can be a wild-type AAV capsid protein or a variant, e.g., a structural and/or functional variant from a wild-type or a reference capsid protein, referred to herein as an “AAV capsid variant.” In some embodiments, the AAV capsid variant described herein has the ability to enclose, e.g., encapsulate, a viral genome and/or is capable of entry into a cell, e.g., a mammalian cell. In some embodiments, the AAV capsid variant described herein may have modified tropism compared to that of a wild-type AAV capsid, e.g., the corresponding wild-type capsid.

[0976] Central Nervous System or CNS: As used herein, “central nervous system” or “CNS” refers to one of the two major subdivisions of the nervous system, which in vertebrates includes the brain and spinal cord. The central nervous system coordinates the activity of the entire nervous system.

[0977] Cervical Region: As used herein, “cervical region” refers to the region of the spinal cord comprising the cervical vertebrae C1, C2, C3, C4, C5, C6, C7, and C8.

[0978] Cis-Elements: As used herein, cis-elements or the synonymous term “cis-regulatory elements” refer to regions of non-coding DNA which regulate the transcription of nearby genes. The Latin prefix “cis” translates to “on this side.” Cis-elements are found in the vicinity of the gene, or genes, they regulate. Examples of cis-elements include a Kozak sequence, SV40 introns, or a portion of the backbone.

[0979] CNS tissue: As used herein, “CNS tissue” or “CNS tissues” refers to the tissues of the central nervous system, which in vertebrates, include the brain and spinal cord and sub-structures thereof.

[0980] CNS structures: As used herein, “CNS structures” refers to structures of the central nervous system and sub-structures thereof. Non-limiting examples of structures in the spinal cord may include, ventral horn, dorsal horn, white matter, and nervous system pathways or nuclei within. Non-limiting examples of structures in the brain include, forebrain, midbrain, hindbrain, diencephalon, telencephalon, myelencephalon, metencephalon, mesencephalon, prosencephalon, rhombencephalon, cortices, frontal lobe, parietal lobe, temporal lobe, occipital lobe, cerebrum, thalamus, hypothalamus, tectum, tegmentum, cerebellum, pons, medulla, amygdala, hippocampus, basal ganglia, corpus callosum, pituitary gland, putamen, striatum, ventricles and sub-structures thereof.

[0981] CNS Cells: As used herein, “CNS cells” refers to cells of the central nervous system and sub-structures thereof. Non-limiting examples of CNS cells include, neurons and sub-types thereof, glia, microglia, oligodendrocytes, ependymal cells and astrocytes. Non-limiting examples of neurons include sensory neurons, motor neurons, interneurons, unipolar cells, bipolar cells, multipolar cells, pseudounipolar cells, pyramidal cells, basket cells, stellate cells, Purkinje cells, Betz cells, amacrine cells, granule cell, ovoid cell, medium aspiny neurons and large aspiny neurons.

[0982] Codon optimization: As used herein, the term “codon optimization” refers to a process of changing codons of a given gene in such a manner that the polypeptide sequence encoded by the gene remains the same while the changed codons improve the process of expression of the polypeptide sequence. For example, if the polypeptide is of a human protein sequence and expressed in E. coli, expression will often be improved if codon optimization is performed on the DNA sequence to change the human codons to codons that are more effective for expression in E. coli.

[0983] Conservative amino acid substitution: As used herein, a “conservative amino acid substitution” is one in which the amino acid residue is replaced with an amino acid residue having a similar side chain. Families of amino acid residues having similar side chains have been defined in the art. These families include amino acids with basic side chains (e.g., lysine, arginine, histidine), acidic side chains (e.g., aspartic acid, glutamic acid), uncharged polar side chains (e.g., glycine, asparagine, glutamine, serine, threonine, tyrosine, cysteine), nonpolar side chains (e.g., alanine, valine, leucine, isoleucine, proline, phenylalanine, methionine, tryptophan), beta-branched side chains (e.g., threonine, valine, isoleucine) and aromatic side chains (e.g., tyrosine, phenylalanine, tryptophan, histidine).

[0984] Conserved: As used herein, the term “conserved” refers to nucleotides or amino acid residues of polynucleotide or polypeptide sequences, respectively, that are those that occur unaltered in the same position of two or more sequences being compared. Nucleotides or amino acids that are relatively conserved are those that are conserved among more related sequences than nucleotides or amino acids appearing elsewhere in the sequences.

[0985] In some embodiments, two or more sequences are said to be “completely conserved” if they are 100% identical to one another. In some embodiments, two or more sequences are said to be “highly conserved” if they are at least 70% identical, at least 80% identical, at least 90% identical, or at least 95% identical to one another. In some embodiments, two or more sequences are said to be “highly conserved” if they are about 70% identical, about 80% identical, about 90% identical, about 95%, about 98%, or about 99% identical to one another. In some embodiments, two or more sequences are said to be “conserved” if they are at least 30% identical, at least 40% identical, at least 50% identical, at least 60% identical, at least 70% identical, at least 80% identical, at least 90% identical, or at least 95% identical to one another. In some embodiments, two or more sequences are said to be “conserved” if they are about 30% identical, about 40% identical, about 50% identical, about 60% identical, about 70% identical, about 80% identical, about 90% identical, about 95% identical, about 98% identical, or about 99% identical to one another. Conservation of sequence may apply to the entire length of an oligonucleotide or polypeptide or may apply to a portion, region or feature thereof.

[0986] In some embodiments, conserved sequences are not contiguous. Those skilled in the art are able to appreciate how to achieve alignment when gaps in contiguous alignment are present between sequences, and to align corresponding residues not withstanding insertions or deletions present.

[0987] Delivery: As used herein, “delivery” refers to the act or manner of delivering a parvovirus e.g., AAV compound, substance, entity, moiety, cargo or payload to a target. Such target may be a cell, tissue, organ, organism, or system (whether biological or production).

[0988] Delivery Agent: As used herein, “delivery agent” refers to any agent which facilitates, at least in part, the delivery of one or more substances (including, but not limited to a compounds and/or compositions of the present disclosure, e.g., viral particles or AAV vectors) to targeted cells.

[0989] Delivery route: As used herein, the term “delivery route” and the synonymous term “administration route” refers to any of the different methods for providing a therapeutic agent to a subject. Routes of administration are generally classified by the location at which the substance is applied and may also be classified based on where the target of action is. Examples include, but are not limited to: intravenous administration, subcutaneous administration, oral administration, parenteral administration, enteral administration, topical administration, sublingual administration, inhalation administration, and injection administration, or other routes of administration described herein.

[0990] Derivative: As used herein, the term “derivative” refers to a composition (e.g., sequence, compound, formulation, etc.) that is derived from, or finds its basis in, a parent composition. Non-limiting examples of a parent composition include a wild-type or original amino acid or nucleic acid sequence, or an undiluted formulation. In some embodiments, a derivative is a variant of a parent composition. A derivative may differ from the parent composition by less than about 1%, less than about 5%, less than about 10%, less than about 15%, less than about 20%, less than about 25%, less than about 30%, less than about 35%, less than about 40%, less than about 45%, or less than about 50%. In certain embodiments, a derivative may differ from a parent composition by more than about 50%. In certain embodiments, a derivative may differ from a parent composition by more than about 75%. In some embodiments, a derivative may be a fragment or truncation of a parent amino acid or nucleotide sequence. As a non-limiting example, a derivative may be a sequence with a nucleotide or peptide insert as compared to a parent nucleic acid or amino acid sequence (e.g., AAVPHP.B as compared to AAV9).

[0991] Effective amount: As used herein, the term “effective amount” of an agent is that amount sufficient to effect beneficial or desired results, for example, upon single or multiple dose administration to a subject or a cell, in curing, alleviating, relieving or improving one or more symptoms of a disorder and, as such, an “effective amount” depends upon the context in which it is being applied. For example, in the context of administering an agent that treats Parkinson Disease (PD) and related disorders, including Gaucher Disease, and Dementia with Lewy Bodies (collectively, “GBA-related disorders”), an effective amount of an agent is, for example, an amount sufficient to achieve treatment, as defined herein, of a GBA-related disorder as compared to the response obtained without administration of the agent.

[0992] Engineered: As used herein, embodiments of the disclosure are “engineered” when they are designed to have a feature or property, whether structural or chemical, that varies from a starting point, wild-type or native molecule. Thus, engineered agents or entities are those whose design and/or production include an act of the hand of man.

[0993] Expression: As used herein, “expression” of a nucleic acid sequence refers to one or more of the following events: (1) production of an RNA template from a DNA sequence (e.g., by transcription); (2) processing of an RNA transcript (e.g., by splicing, editing, 5′ cap formation, and/or 3′ end processing); (3) translation of an RNA into a polypeptide or protein; (4) folding of a polypeptide or protein; and/or (5) post-translational modification of a polypeptide or protein.

[0994] Excipient: As used herein, the term “excipient” refers to an inactive substance that serves as the vehicle or medium for an active pharmaceutical agent or other active substance.

[0995] Formulation: As used herein, a “formulation” includes at least a compound and/or composition of the present disclosure (e.g., a vector, AAV particle, etc.) and a delivery agent.

[0996] Fragment: A “fragment,” as used herein, refers to a contiguous portion of a whole. For example, fragments of proteins may comprise polypeptides obtained by digesting full-length protein isolated from cultured cells. In some embodiments, a fragment of a protein includes at least 3, 4, 5, 6, 7, 8, 9, 10, 11, 12, 13, 14, 15, 16, 17, 18, 19, 20, 25, 30, 35, 40, 45, 50, 55, 60, 65, 70, 75, 80, 85, 90, 95, 100, 150, 200, 250 or more amino acids. A fragment may also refer to a truncation (e.g., an N-terminal and/or C-terminal truncation) of a protein or a truncation (e.g., at the 5′ and/or 3′ end) of a nucleic acid. A protein fragment may be obtained by expression of a truncated nucleic acid, such that the nucleic acid encodes a portion of the full-length protein.

[0997] GBA-related disorder: The terms “GBA-related disorder,” “GBA-related disease,” “GBA patient,” and the like refer to diseases or disorders having a deficiency in the GBA gene, such as a heritable, e.g., autosomal recessive, mutation in GBA resulting in deficient or defective GCase protein expression in patient cells. GBA-related disorders expressly include, but are not limited to Parkinson disease (PD), Gaucher disease, and Dementia with Lewy Bodies; and may include additional Lewy body disorders, lysosomal storage disorders, and related disorders. GBA patients are individuals harboring one or more mutation in the GBA gene, including, e.g., biallelic mutations, making them more susceptible to GBA-related disorders.

[0998] GCase protein: As used herein, the terms “GCase”, “GCase protein,” “GCase proteins,” and the like refer to protein products or portions of protein products including peptides of the GBA gene (Ensemble gene ID: ENSG00000177628), homologs or variants thereof, and orthologs thereof, including non-human proteins and homologs thereof. GCase proteins include fragments, derivatives, and modifications of GBA gene products.

[0999] Gene expression: The term “gene expression” refers to the process by which a nucleic acid sequence undergoes successful transcription and in most instances translation to produce a protein or peptide. For clarity, when reference is made to measurement of “gene expression”, this should be understood to mean that measurements may be of the nucleic acid product of transcription, e.g., RNA or mRNA or of the amino acid product of translation, e.g., polypeptides or peptides. Methods of measuring the amount or levels of RNA, mRNA, polypeptides, and peptides are well known in the art.

[1000] Homology: As used herein, the term “homology” refers to the overall relatedness between polymeric molecules, e.g. between nucleic acid molecules (e.g. DNA molecules and/or RNA molecules) and/or between polypeptide molecules. In some embodiments, polymeric molecules are considered to be “homologous” to one another if their sequences are at least 25%, 30%, 35%, 40%, 45%, 50%, 55%, 60%, 65%, 70%, 75%, 80%, 85%, 90%, 95%, or 99% identical or similar. The term “homologous” necessarily refers to a comparison between at least two sequences (polynucleotide or polypeptide sequences). In accordance with the disclosure, two polynucleotide sequences are considered to be homologous if the polypeptides they encode are at least about 50%, 60%, 70%, 80%, 90%, 95%, or even 99% identical for at least one stretch of at least about 20 amino acids. In some embodiments, homologous polynucleotide sequences are characterized by the ability to encode a stretch of at least 4-5 uniquely specified amino acids. For polynucleotide sequences less than 60 nucleotides in length, homology is typically determined by the ability to encode a stretch of at least 4-5 uniquely specified amino acids. In accordance with the disclosure, two protein sequences are considered to be homologous if the proteins are at least about 50%, 60%, 70%, 80%, or 90% identical for at least one stretch of at least about 20 amino acids. In many embodiments, homologous protein may show a large overall degree of homology and a high degree of homology over at least one short stretch of at least 3, 4, 5, 6, 7, 8, 9, 10, 11, 12, 13, 14, 15, 16, 17, 18, 19, 20, 25, 30, 35, 40, 45, 50, or more amino acids. In many embodiments, homologous proteins share one or more characteristic sequence elements. As used herein, the term “characteristic sequence element” refers to a motif present in related proteins. In some embodiments, the presence of such motifs correlates with a particular activity (such as biological activity).

[1001] Humanized: As used herein, the term “humanized” refers to a non-human sequence of a polynucleotide or a polypeptide which has been altered to increase its similarity to a corresponding human sequence.

[1002] Identity: As used herein, the term “identity” refers to the overall relatedness between polymeric molecules, e.g., between oligonucleotide molecules (e.g. DNA molecules and/or RNA molecules) and/or between polypeptide molecules. Calculation of the percent identity of two polynucleotide sequences, for example, may be performed by aligning the two sequences for optimal comparison purposes (e.g., gaps can be introduced in one or both of a first and a second nucleic acid sequences for optimal alignment and non-identical sequences can be disregarded for comparison purposes). In certain embodiments, the length of a sequence aligned for comparison purposes is at least 30%, at least 40%, at least 50%, at least 60%, at least 70%, at least 80%, at least 90%, at least 95%, or 100% of the length of the reference sequence. The nucleotides at corresponding nucleotide positions are then compared. When a position in the first sequence is occupied by the same nucleotide as the corresponding position in the second sequence, then the molecules are identical at that position. The percent identity between the two sequences is a function of the number of identical positions shared by the sequences, taking into account the number of gaps, and the length of each gap, which needs to be introduced for optimal alignment of the two sequences. The comparison of sequences and determination of percent identity between two sequences can be accomplished using a mathematical algorithm. For example, the percent identity between two nucleotide sequences can be determined using methods such as those described in Computational Molecular Biology, Lesk, A. M., ed., Oxford University Press, New York, 1988; Biocomputing: Informatics and Genome Projects, Smith, D. W., ed., Academic Press, New York, 1993; Sequence Analysis in Molecular Biology, von Heinje, G., Academic Press, 1987; Computer Analysis of Sequence Data, Part I, Griffin, A. M., and Griffin, H. G., eds., Humana Press, New Jersey, 1994; and Sequence Analysis Primer, Gribskov, M. and Devereux, J., eds., M Stockton Press, New York, 1991; each of which is incorporated herein by reference in its entirety. For example, the percent identity between two nucleotide sequences can be determined, for example using the algorithm of Meyers and Miller (CABIOS, 1989, 4:11-17), which has been incorporated into the ALIGN program (version 2.0) using a PAM120 weight residue table, a gap length penalty of 12 and a gap penalty of 4. The percent identity between two nucleotide sequences can, alternatively, be determined using the GAP program in the GCG software package using an NWSgapdna.CMP matrix. Methods commonly employed to determine percent identity between sequences include, but are not limited to those disclosed in Carillo, H., and Lipman, D., SIAM J Applied Math., 48:1073 (1988); incorporated herein by reference in its entirety. Techniques for determining identity are codified in publicly available computer programs. Computer software to determine homology between two sequences include, but are not limited to, GCG program package, Devereux, J., et al., Nucleic Acids Research, 12(1), 387 (1984)), BLASTP, BLASTN, and FASTA Altschul, S. F. et al., J. Molecular Biol., 215, 403 (1990)).

[1003] Isolated: As used herein, the term “isolated” refers to a substance or entity that is altered or removed from the natural state, e.g., altered or removed from at least some of component with which it is associated in the natural state. For example, a nucleic acid or a peptide naturally present in a living animal is not “isolated,” but the same nucleic acid or peptide partially or completely separated from the coexisting materials of its natural state is “isolated.” An isolated nucleic acid or protein can exist in substantially purified form, or can exist in a non-native environment such as, for example, a host cell. Such polynucleotides could be part of a vector and/or such polynucleotides or polypeptides could be part of a composition, and still be isolated in that such vector or composition is not part of the environment in which it is found in nature. In some embodiments, an isolated nucleic acid is recombinant, e.g., incorporated into a vector.

[1004] Lumbar Region: As used herein, the term “lumbar region” refers to the region of the spinal cord comprising the lumbar vertebrae L1, L2, L3, L4, and L5.

[1005] miR binding site series: As used herein, the “miR binding site series” or the “miR binding site” includes an RNA sequence on the RNA transcript produced by transcribing the AAV vector genome. The “miR binding site series” or the “miR binding site” also includes the DNA sequence corresponding to the RNA sequence, in that they differ only by the T in DNA and the U in RNA. The reverse complement of such DNA is the coding sequence for the RNA sequence. That is, in some embodiments, in an expression cassette containing a DNA positive strand, the miR binding site sequence is the reverse complement of the miRNA to which it binds.

[1006] Modified: As used herein, the term “modified” refers to a changed state or structure of a molecule or entity as compared with a parent or reference molecule or entity. Molecules may be modified in many ways including chemically, structurally, and functionally. In some embodiments, compounds and/or compositions of the present disclosure are modified by the introduction of non-natural amino acids, or non-natural nucleotides.

[1007] Mutation: As used herein, the term “mutation” refers to a change and/or alteration. In some embodiments, mutations may be changes and/or alterations to proteins (including peptides and polypeptides) and/or nucleic acids (including polynucleic acids). In some embodiments, mutations comprise changes and/or alterations to a protein and/or nucleic acid sequence. Such changes and/or alterations may comprise the addition, substitution and or deletion of one or more amino acids (in the case of proteins and/or peptides) and/or nucleotides (in the case of nucleic acids and or polynucleic acids). In embodiments wherein mutations comprise the addition and/or substitution of amino acids and/or nucleotides, such additions and/or substitutions may comprise 1 or more amino acid and/or nucleotide residues and may include modified amino acids and/or nucleotides. One or more mutations may result in a “mutant,” “derivative,” or “variant,” e.g., of a nucleic acid sequence or polypeptide or protein sequence.

[1008] Naturally occurring: As used herein, “naturally occurring” or “wild-type” means existing in nature without artificial aid, or involvement of the hand of man. “Naturally occurring” or “wild-type” may refer to a native form of a biomolecule, sequence, or entity.

[1009] Non-human vertebrate: As used herein, a “non-human vertebrate” includes all vertebrates except Homo sapiens, including wild and domesticated species. Examples of non-human vertebrates include, but are not limited to, mammals, such as alpaca, banteng, bison, camel, cat, cattle, deer, dog, donkey, gayal, goat, guinea pig, horse, llama, mule, pig, rabbit, reindeer, sheep water buffalo, and yak.

[1010] Nucleic acid: As used herein, the terms “nucleic acid,” “polynucleotide,” and “oligonucleotide” refer to any nucleic acid polymers composed of either polydeoxyribonucleotides (containing 2-deoxy-D-ribose), or polyribonucleotides (containing D-ribose), or any other type of polynucleotide that is an N glycoside of a purine or pyrimidine base, or modified purine or pyrimidine bases. There is no intended distinction in length between the term “nucleic acid,” “polynucleotide,” and “oligonucleotide,” and these terms will be used interchangeably. These terms refer only to the primary structure of the molecule. Thus, these terms include double- and single-stranded DNA, as well as double- and single-stranded RNA.

[1011] Operably linked: As used herein, the phrase “operably linked” refers to a functional connection between two or more molecules, constructs, transcripts, entities, moieties or the like.

[1012] Particle: As used herein, a “particle” is a virus comprised of at least two components, a protein capsid and a polynucleotide sequence enclosed within the capsid.

[1013] Patient: As used herein, “patient” refers to a subject who may seek or be in need of treatment, requires treatment, is receiving treatment, will receive treatment, or a subject who is under care by a trained (e.g., licensed) professional for a particular disease or condition.

[1014] Payload: As used herein, “payload” or “payload region” refers to one or more polynucleotides or polynucleotide regions encoded by or within a viral genome or an expression product of such polynucleotide or polynucleotide region, e.g., a transgene, a polynucleotide encoding a polypeptide.

[1015] Payload construct: As used herein, “payload construct” is one or more polynucleotide regions encoding or comprising a payload that is flanked on one or both sides by an inverted terminal repeat (ITR) sequence. The payload construct is a template that is replicated in a viral production cell to produce a viral genome.

[1016] Payload construct vector: As used herein, “payload construct vector” is a vector encoding or comprising a payload construct, and regulatory regions for replication and expression in bacterial cells. The payload construct vector may also comprise a component for viral expression in a viral replication cell.

[1017] Peptide: As used herein, the term “peptide” refers to a chain of amino acids that is less than or equal to about 50 amino acids long, e.g., about 5, 10, 15, 20, 25, 30, 35, 40, 45, or 50 amino acids long.

[1018] Pharmaceutically acceptable: The phrase “pharmaceutically acceptable” is employed herein to refer to those compounds, materials, compositions, and/or dosage forms which are, within the scope of sound medical judgment, suitable for use in contact with the tissues of human beings and animals without excessive toxicity, irritation, allergic response, or other problem or complication, commensurate with a reasonable benefit/risk ratio.

[1019] Pharmaceutically acceptable excipients: As used herein, the term “pharmaceutically acceptable excipient,” as used herein, refers to any ingredient other than active agents (e.g., as described herein) present in pharmaceutical compositions and having the properties of being substantially nontoxic and non-inflammatory in subjects. In some embodiments, pharmaceutically acceptable excipients are vehicles capable of suspending and/or dissolving active agents. Excipients may include, for example: antiadherents, antioxidants, binders, coatings, compression aids, disintegrants, dyes (colors), emollients, emulsifiers, fillers (diluents), film formers or coatings, flavors, fragrances, glidants (flow enhancers), lubricants, preservatives, printing inks, sorbents, suspending or dispersing agents, sweeteners, and waters of hydration. Excipients include, but are not limited to: butylated hydroxytoluene (BHT), calcium carbonate, calcium phosphate (dibasic), calcium stearate, croscarmellose, cross-linked polyvinyl pyrrolidone, citric acid, crospovidone, cysteine, ethylcellulose, gelatin, hydroxypropyl cellulose, hydroxypropyl methylcellulose, lactose, magnesium stearate, maltitol, mannitol, methionine, methylcellulose, methyl paraben, microcrystalline cellulose, polyethylene glycol, polyvinyl pyrrolidone, povidone, pregelatinized starch, propyl paraben, retinyl palmitate, shellac, silicon dioxide, sodium carboxymethyl cellulose, sodium citrate, sodium starch glycolate, sorbitol, starch (corn), stearic acid, sucrose, talc, titanium dioxide, vitamin A, vitamin E, vitamin C, and/or xylitol.

[1020] Pharmaceutically acceptable salts: Pharmaceutically acceptable salts of the compounds described herein are forms of the disclosed compounds wherein the acid or base moiety is in its salt form (e.g., as generated by reacting a free base group with a suitable organic acid). Examples of pharmaceutically acceptable salts include, but are not limited to, mineral or organic acid salts of basic residues such as amines; alkali or organic salts of acidic residues such as carboxylic acids; and the like. Representative acid addition salts include acetate, adipate, alginate, ascorbate, aspartate, benzenesulfonate, benzoate, bisulfate, borate, butyrate, camphorate, camphorsulfonate, citrate, cyclopentanepropionate, digluconate, dodecylsulfate, ethanesulfonate, fumarate, glucoheptonate, glycerophosphate, hemisulfate, heptonate, hexanoate, hydrobromide, hydrochloride, hydroiodide, 2-hydroxy-ethanesulfonate, lactobionate, lactate, laurate, lauryl sulfate, malate, maleate, malonate, methanesulfonate, 2-naphthalenesulfonate, nicotinate, nitrate, oleate, oxalate, palmitate, pamoate, pectinate, persulfate, 3-phenylpropionate, phosphate, picrate, pivalate, propionate, stearate, succinate, sulfate, tartrate, thiocyanate, toluenesulfonate, undecanoate, valerate salts, and the like. Representative alkali or alkaline earth metal salts include sodium, lithium, potassium, calcium, magnesium, and the like, as well as nontoxic ammonium, quaternary ammonium, and amine cations, including, but not limited to ammonium, tetramethylammonium, tetraethylammonium, methylamine, dimethylamine, trimethylamine, triethylamine, ethylamine, and the like. Pharmaceutically acceptable salts include the conventional non-toxic salts, for example, from non-toxic inorganic or organic acids. In some embodiments, a pharmaceutically acceptable salt is prepared from a parent compound which contains a basic or acidic moiety by conventional chemical methods. Generally, such salts can be prepared by reacting the free acid or base forms of these compounds with a stoichiometric amount of the appropriate base or acid in water or in an organic solvent, or in a mixture of the two; generally, nonaqueous media like ether, ethyl acetate, ethanol, isopropanol, or acetonitrile are used. Lists of suitable salts are found in Remington's Pharmaceutical Sciences, 17^{th} ed., Mack Publishing Company, Easton, Pa., 1985, p. 1418, Pharmaceutical Salts: Properties, Selection, and Use, P. H. Stahl and C. G. Wermuth (eds.), Wiley-VCH, 2008, and Berge et al., Journal of Pharmaceutical Science, 66, 1-19 (1977), the contents of each of which are incorporated herein by reference in their entirety.

[1021] Pharmaceutical Composition: As used herein, the term “pharmaceutical composition” or pharmaceutically acceptable composition” comprises AAV polynucleotides, AAV genomes, or AAV particle and one or more pharmaceutically acceptable excipients, solvents, adjuvants, and/or the like.

[1022] Polypeptide: As used herein, the term “polypeptide” refers to an organic polymer consisting of a large number of amino-acid residues bonded together in a chain. A monomeric protein molecule is a polypeptide.

[1023] Preventing: As used herein, the term “preventing” refers to partially or completely delaying onset of an infection, disease, disorder and/or condition; partially or completely delaying onset of one or more symptoms, features, or clinical manifestations of a particular infection, disease, disorder, and/or condition; partially or completely delaying onset of one or more symptoms, features, or manifestations of a particular infection, disease, disorder, and/or condition; partially or completely delaying progression from an infection, a particular disease, disorder and/or condition; and/or decreasing the risk of developing pathology associated with the infection, the disease, disorder, and/or condition.

[1024] Promoter: As used herein, the term “promoter” refers to a nucleic acid site to which a polymerase enzyme will bind to initiate transcription (DNA to RNA) or reverse transcription (RNA to DNA).

[1025] Protein of interest: As used herein, the terms “proteins of interest” or “desired proteins” include those provided herein and fragments, mutants, variants, or alterations thereof.

[1026] Purified: As used herein, the term “purify” means to make substantially pure or clear from one or more unwanted components, material defilement, admixture or imperfection. “Purified” refers to the state of being pure. “Purification” refers to the process of making pure. As used herein, a substance is “pure” if it is substantially free of (substantially isolated from) one or more components, e.g., one or more components found in a native context.

[1027] Region: As used herein, the term “region” refers to a zone or general area. In some embodiments, when referring to a protein or protein module, a region may comprise a linear sequence of amino acids along the protein or protein module or may comprise a three dimensional area, an epitope and/or a cluster of epitopes. In some embodiments, regions comprise terminal regions. As used herein, the term “terminal region” refers to regions located at the ends or termini of a given agent. When referring to proteins, terminal regions may comprise N- and/or C-termini. N-termini refer to the end of a protein comprising an amino acid with a free amino group. C-termini refer to the end of a protein comprising an amino acid with a free carboxyl group. N- and/or C-terminal regions may comprise the N- and/or C-termini as well as surrounding amino acids. In some embodiments, N- and/or C-terminal regions comprise from about 3 amino acids to about 30 amino acids, from about 5 amino acids to about 40 amino acids, from about 10 amino acids to about 50 amino acids, from about 20 amino acids to about 100 amino acids and/or at least 100 amino acids. In some embodiments, N-terminal regions may comprise any length of amino acids that includes the N-terminus, but does not include the C-terminus. In some embodiments, C-terminal regions may comprise any length of amino acids, which include the C-terminus, but do not comprise the N-terminus.

[1028] In some embodiments, when referring to a polynucleotide, a region may comprise a linear sequence of nucleic acids along the polynucleotide or may comprise a three dimensional area, secondary structure, or tertiary structure. In some embodiments, regions comprise terminal regions. As used herein, the term “terminal region” refers to regions located at the ends or termini of a given agent. When referring to polynucleotides, terminal regions may comprise 5′ and 3′ termini. 5′ termini refer to the end of a polynucleotide comprising a nucleic acid with a free phosphate group. 3′ termini refer to the end of a polynucleotide comprising a nucleic acid with a free hydroxyl group. 5′ and 3′ regions may there for comprise the 5′ and 3′ termini as well as surrounding nucleic acids. In some embodiments, 5′ and 3′ terminal regions comprise from about 9 nucleic acids to about 90 nucleic acids, from about 15 nucleic acids to about 120 nucleic acids, from about 30 nucleic acids to about 150 nucleic acids, from about 60 nucleic acids to about 300 nucleic acids and/or at least 300 nucleic acids. In some embodiments, 5′ regions may comprise any length of nucleic acids that includes the 5′ terminus, but does not include the 3′ terminus. In some embodiments, 3′ regions may comprise any length of nucleic acids, which include the 3′ terminus, but does not comprise the 5′ terminus.

[1029] RNA or RNA molecule: As used herein, the term “RNA” or “RNA molecule” or “ribonucleic acid molecule” refers to a polymer of ribonucleotides; the term “DNA” or “DNA molecule” or “deoxyribonucleic acid molecule” refers to a polymer of deoxyribonucleotides. DNA and RNA can be synthesized naturally, e.g., by DNA replication and transcription of DNA, respectively; or be chemically synthesized. DNA and RNA can be single-stranded (i.e., ssRNA or ssDNA, respectively) or multi-stranded (e.g., double stranded, i.e., dsRNA and dsDNA, respectively). The term “mRNA” or “messenger RNA”, as used herein, refers to a single stranded RNA that encodes the amino acid sequence of one or more polypeptide chains.

[1030] Sample: As used herein, the term “sample” refers to an aliquot or portion taken from a source and/or provided for analysis or processing. In some embodiments, a sample is from a biological source such as a tissue, cell or component part (e.g. a body fluid, including but not limited to blood, mucus, lymphatic fluid, synovial fluid, cerebrospinal fluid, saliva, amniotic fluid, amniotic cord blood, urine, vaginal fluid and semen). In some embodiments, a sample may be or comprise a homogenate, lysate or extract prepared from a whole organism or a subset of its tissues, cells or component parts, or a fraction or portion thereof, including but not limited to, for example, plasma, serum, spinal fluid, lymph fluid, the external sections of the skin, respiratory, intestinal, and genitourinary tracts, tears, saliva, milk, blood cells, tumors, organs. In some embodiments, a sample is or comprises a medium, such as a nutrient broth or gel, which may contain cellular components, such as proteins or nucleic acid molecules. In some embodiments, a “primary” sample is an aliquot of the source. In some embodiments, a primary sample is subjected to one or more processing (e.g., separation, purification, etc.) steps to prepare a sample for analysis or other use.

[1031] Serotype: As used herein, the term “serotype” refers to distinct variations in a capsid of an AAV based on surface antigens which allow epidemiologic classifications of the AAVs at the sub-species level.

[1032] Signal Sequences: As used herein, the phrase “signal sequences” refers to a sequence which can direct the transport or localization.

[1033] Single unit dose: As used herein, a “single unit dose” is a dose of any therapeutic administered in one dose/at one time/single route/single point of contact, i.e., single administration event. In some embodiments, a single unit dose is provided as a discrete dosage form (e.g., a tablet, capsule, patch, loaded syringe, vial, etc.).

[1034] Similarity: As used herein, the term “similarity” refers to the overall relatedness between polymeric molecules, e.g. between polynucleotide molecules (e.g. DNA molecules and/or RNA molecules) and/or between polypeptide molecules. Calculation of percent similarity of polymeric molecules to one another can be performed in the same manner as a calculation of percent identity, except that calculation of percent similarity takes into account conservative substitutions as is understood in the art.

[1035] Spacer: As used herein, a “spacer” is generally any selected nucleic acid sequence of, e.g., 1, 2, 3, 4, 5, 6, 7, 8, 9, or 10 nucleotides in length, which is located between two or more consecutive miR binding site sequences.

[1036] Stabilized: As used herein, the term “stabilize”, “stabilized,” “stabilized region” means to make or become stable. In some embodiments, stability is measured relative to an absolute value. In some embodiments, stability is measured relative to a reference compound or entity.

[1037] Subject: As used herein, the term “subject” or “patient” refers to any organism to which a composition in accordance with the disclosure may be administered, e.g., for experimental, diagnostic, prophylactic, and/or therapeutic purposes. Similarly, “subject” or “patient” refers to an organism who may seek, who may require, who is receiving, or who will receive treatment or who is under care by a trained professional for a particular disease or condition. Typical subjects include animals (e.g., mammals such as mice, rats, rabbits, non-human primates, and humans). In certain embodiments, a subject or patient may be susceptible to or suspected of having a GBA-related disorder. In certain embodiments, a subject or patient may be diagnosed with PD, Gaucher Disease, or Dementia with Lewy Bodies disease.

[1038] Substantially: As used herein, the term “substantially” refers to the qualitative condition of exhibiting total or near-total extent or degree of a characteristic or property of interest. One of ordinary skill in the biological arts will understand that biological and chemical phenomena rarely, if ever, go to completion and/or proceed to completeness or achieve or avoid an absolute result. The term “substantially” is therefore used herein to capture the potential lack of completeness inherent in many biological and chemical phenomena.

[1039] Substantially equal: As used herein as it relates to time differences between doses, the term means plus/minus 2%.

[1040] Substantially simultaneously: As used herein and as it relates to plurality of doses, the term typically means within about 2 seconds.

[1041] Suffering from: An individual who is “suffering from” a disease, disorder, and/or condition has been diagnosed with or displays one or more symptoms of a disease, disorder, and/or condition.

[1042] Susceptible to: An individual who is “susceptible to” a disease, disorder, and/or condition has not been diagnosed with and/or may not exhibit symptoms of the disease, disorder, and/or condition but harbors a propensity to develop a disease or its symptoms. In some embodiments, an individual who is susceptible to a disease, disorder, and/or condition (for example, cancer) may be characterized by one or more of the following: (1) a genetic mutation associated with development of the disease, disorder, and/or condition; (2) a genetic polymorphism associated with development of the disease, disorder, and/or condition; (3) increased and/or decreased expression and/or activity of a protein and/or nucleic acid associated with the disease, disorder, and/or condition; (4) habits and/or lifestyles associated with development of the disease, disorder, and/or condition; (5) a family history of the disease, disorder, and/or condition; and (6) exposure to and/or infection with a microbe associated with development of the disease, disorder, and/or condition. In some embodiments, an individual who is susceptible to a disease, disorder, and/or condition will develop the disease, disorder, and/or condition. In some embodiments, an individual who is susceptible to a disease, disorder, and/or condition will not develop the disease, disorder, and/or condition.

[1043] Synthetic: The term “synthetic” means produced, prepared, and/or manufactured by the hand of man. Synthesis of polynucleotides or polypeptides or other molecules of the present disclosure may be chemical or enzymatic.

[1044] Targeting: As used herein, “targeting” means the process of design and selection of nucleic acid sequence that will hybridize to a target nucleic acid and induce a desired effect.

[1045] Targeted Cells: As used herein, “target cells” or “targeted cells” refers to any one or more cells of interest. The cells may be found in vitro, in vivo, in situ or in the tissue or organ of an organism. The organism may be an animal, a mammal, a human and/or a patient. The target cells may be CNS cells or cells in CNS tissue.

[1046] Therapeutic Agent: The term “therapeutic agent” refers to any agent that, when administered to a subject has a therapeutic, diagnostic, and/or prophylactic effect and/or elicits a desired biological and/or pharmacological effect.

[1047] Therapeutically effective amount: As used herein, the term “therapeutically effective amount” means an amount of an agent to be delivered (e.g., nucleic acid, drug, therapeutic agent, diagnostic agent, prophylactic agent, etc.) that is sufficient, when administered to a subject suffering from or susceptible to an infection, disease, disorder, and/or condition, to treat, improve symptoms of, diagnose, prevent, and/or delay the onset of the infection, disease, disorder, and/or condition. In some embodiments, a therapeutically effective amount is provided in a single dose. In some embodiments, a therapeutically effective amount is administered in a dosage regimen comprising a plurality of doses. Those skilled in the art will appreciate that in some embodiments, a unit dosage form may be considered to comprise a therapeutically effective amount of a particular agent or entity if it comprises an amount that is effective when administered as part of such a dosage regimen.

[1048] Therapeutically effective outcome: As used herein, the term “therapeutically effective outcome” means an outcome that is sufficient in a subject suffering from or susceptible to an infection, disease, disorder, and/or condition, to treat, improve symptoms of, diagnose, prevent, and/or delay the onset of the infection, disease, disorder, and/or condition.

[1049] Thoracic Region: As used herein, a “thoracic region” refers to a region of the spinal cord comprising the thoracic vertebrae T1, T2, T3, T4, T5, T6, T7, T8, T9, T10, T11, and T12.

[1050] Treating: As used herein, the term “treating” refers to partially or completely alleviating, ameliorating, improving, relieving, reversing, delaying onset of, inhibiting progression of, reducing severity of, and/or reducing incidence of one or more symptoms or features of a particular infection, disease, disorder, and/or condition. Treatment may be administered to a subject who does not exhibit signs of a disease, disorder, and/or condition and/or to a subject who exhibits only early signs of a disease, disorder, and/or condition for the purpose of decreasing the risk of developing pathology associated with the disease, disorder, and/or condition.

[1051] Unmodified: As used herein, “unmodified” refers to any substance, compound or molecule prior to being changed in any way. Unmodified may, but does not always, refer to the wild-type or native form of a biomolecule or entity. Molecules or entities may undergo a series of modifications whereby each modified product may serve as the “unmodified” starting molecule or entity for a subsequent modification.

[1052] Vector: As used herein, a “vector” is any molecule or moiety which transports, transduces or otherwise acts as a carrier of a heterologous molecule. Vectors of the present disclosure may be produced recombinantly and may be based on and/or may comprise adeno-associated virus (AAV) parent or reference sequence(s). Such parent or reference AAV sequences may serve as an original, second, third or subsequent sequence for engineering vectors. In non-limiting examples, such parent or reference AAV sequences may comprise any one or more of the following sequences: a polynucleotide sequence encoding a polypeptide or multi-polypeptide, having a sequence that may be wild-type or modified from wild-type and which sequence may encode full-length or partial sequence of a protein, protein domain, or one or more subunits of GCase protein and variants thereof; a polynucleotide encoding GCase protein and variants thereof, having a sequence that may be wild-type or modified from wild-type; and a transgene encoding GCase protein and variants thereof that may or may not be modified from wild-type sequence.

[1053] Viral construct vector. As used herein, a “viral construct vector” is a vector which comprises one or more polynucleotide regions encoding or comprising Rep and or Cap protein. A viral construct vector may also comprise one or more polynucleotide region encoding or comprising components for viral expression in a viral replication cell.

[1054] Viral genome: As used herein, a “viral genome” or “vector genome” is a polynucleotide comprising at least one inverted terminal repeat (ITR) and at least one encoded payload. A viral genome encodes at least one copy of the payload.

Wild-type: As used herein, “wild-type” is a native form of a biomolecule, sequence, or entity.

### Examples

[1055] The present disclosure is further illustrated by the following non-limiting examples. Experiments described in the Examples establish that enhanced AAV-based GCase gene therapy treatments are superior to and/or additive with wild-type GCase-based treatment in ameliorating GBA-related disorders.

### Cell Lines, Tissues, and Animal Models

[1056] In vitro experiments: Human fibroblasts from GBA patients (all 3 types) were obtained from Corielle. The following Gaucher patient fibroblasts were chosen based on significantly depleted GCase activity (4-6%) and availability of age- and race-matched healthy control fibroblasts: GM04394-fibroblast, GM00852-fibroblast, GM00877-fibroblast, GM05758-fibroblast from skin/inguinal area, and GM02937-fibroblast from skin/unspecified (all available from Corielle).

[1057] GBA-4L/PS-NA primary neurons can be generated from pregnant GBA-4L/PS-NA females from QPS. GBA-knockout (GBA-KO) neuroblastoma cell line (IMR-32 background, available from ATCC) was obtained from Synthego.

[1058] Animal models: GBA-4L/PS-NA mouse models (available at QPS): 4L/PS-NA mice express low level of prosaposin and saposin C, as well as GCase with a point mutation at position V394L/V394L. Strong enlargement of leukocytes and macrophages in visceral organs like spleen, thymus, lung and liver develop as early as 5 week of age. Most deficits and reduced muscle strength accompanied by neuroinflammation in the cortex, and hippocampus increase as animals age. There is significant increase in glucosylceramide and glucosylsphingosine. GBA-4L/PS-NA can survival up to 22 weeks. Homozygous Prnp-SNCA-A53T (M83) mice, by 8-months of age, develop α-syn aggregates and progressively severe motor phenotype.

### Example 1. Vector Design and Synthesis

[1059] An AAV viral genome expressing a payload region comprising a polynucleotide encoding a human GBA polypeptide is generated. The viral genome comprises polynucleotides encoding an AAV capsid of a serotype provided in Table 1. A promoter region regulates expression of the payload region. Widespread GBA distribution is achieved by use of a ubiquitous promoter, such as CBA, to achieve transduction within different CNS cell types.

[1060] Single-stranded codon optimized GBA cDNA sequence under ubiquitous CBA promoter packaged within AAV2 ITRs is generated (wtGBA). Enhanced GBA (enGBA) constructs (see Examples 2-5) are generated and compared against wtGBA. wtGBA and GFP reporter vectors are compared side-by-side to test multiplicity of infection for in vitro experiments. The final AAV transgene design nominations are made based on vectorized in vitro experiments and tested in the proposed in vivo models, including those used for GLP and tolerability studies.

[1061] PD-GBA patients demonstrate a global reduction in GCase levels in the CNS. Consequently, high GCase levels in CSF, caudate, substantia nigra, cortex and cerebellum is targeted. Although the disease pathology is largely neuronal, the therapeutic strategy is expected to benefit by transduction of other CNS cell-types, e.g. astrocytes, via cross-correction benefit.

[1062] In addition to PD-GBA, efficacy in secondary disease indications in patients with GBA mutations is tested, including Gaucher disease (including Neuronopathic Gaucher disease) and Dementia with Lewy bodies.

[1063] Transgenes designed as described above are tested for plasmid-level expression: all cassettes are engineered in single stranded AAV transgene configuration driven by ubiquitous CBA promoter flanked by AAV2 ITRs. The following transgene constructs are engineered and synthesized: 1) codon optimized GBA cDNA construct; 2) enhanced GBA construct comprising GBA cDNA and further encoding prosaposin/saposin C in the same transgene (optimal co-activator gene and linker sequences are selected for vectorization based on plasmid-level expression analysis); 3) enhanced GBA constructs comprising a cell-penetration peptide; and 4) enhanced GBA constructs comprising lysosomal targeting peptides (LTP); and 5) combinatorial enhanced GBA constructs comprising a combination of GBA cDNA, saposin sequence(s), lysosomal targeting sequence(s) and/or cell penetrating peptide sequence(s).

[1064] These constructs are tested for expression/GCase activity in cell culture with ITR plasmid transfections as a first pass. Specifically, plasmids are tested in CHO/HEK-293 cells at 48 hours post transfections. Both lysates and media are assessed for expression. Based on the results, GBA transgene ITR cassettes (wt, enGBA and enGBAcombo constructs) are selected for vectorization and evaluation within in vitro disease model setting.

Upon plasmid-level expression/GCase activity confirmation, select AAV ITR cassettes (wtGBA, enGBA and enGBAcombo) are packaged into HEK 293 small-scale AAV6 or AAV2 preps for initial in vitro evaluations.

### Example 2. Co-Administration of SapC Enhances GBA Gene Therapy

[1065] Viral genomes encoding a GBA protein can also be designed to further encode an enhancement element, e.g., a prosaposin protein, a Saposin C protein, or functional variant thereof. GCase coactivator Saposin C (SapC) is one of the cleavage products of saposin precursor protein Prosaposin. Saposin C is the essential activator of GCase lysosomal enzyme. In mouse models of PD-GBA and Gaucher disease, the combination of loss of function in GBA and Saposin C results in significantly exacerbated disease phenotype. Thus, AAV mediated co-delivery of GBA (e.g., a viral genome encoding a GBA protein, e.g., comprising the nucleotide sequence of SEQ ID NO: 1772, 1773, 1776, 1777, 1780, or 1781, or a functional variant thereof) and cDNA encoding a prosaposin protein (e.g., a prosaposin protein comprising the amino acid sequence of SEQ ID NO: 1750 or 1758, or a functional variant thereof; or encoded by a nucleotide sequence comprising SEQ ID NO: 1858 or 1859, or a functional variant thereof) or a Saposin C (SapC) protein or functional variant thereof (e.g., a SapC protein or functional variant thereof comprising the amino acid sequence of SEQ ID NO: 1788, 1789, 1791, or 1792; or encoded by the nucleotide sequence of SEQ ID NO: 1786, 1787, 1790, or 1791) is tested to increase potency of GBA gene therapy by enhancing catalytic activity of GCase enzyme.

### Example 3. Cell-Penetration Peptides Enhance Cellular Penetration/Uptake

[1066] Viral genomes encoding a GBA protein can also be designed to further encode an enhancement element, e.g., a cell penetrating peptide or functional variant thereof. Without wishing to be bound by theory, it is believed that a cell-penetration peptide (CPP) signal added to the GCase sequence of the transgenes of the disclosure results in increased cellular uptake of secreted GCase product in circulation, in cerebrospinal fluid, and in interstitial fluid from AAV-transduced cells; and this enhanced cell penetration thus increases cross-correction potential of the secreted GCase enzyme. Exemplary CPPs used herein include: HIV-derived TAT peptide (e.g., comprising the amino acid sequence of 1794 and/or encoded by the nucleotide sequence of SEQ ID NO: 1794), human apoliprotein B receptor binding domain (e.g., comprising the amino acid sequence of 1796 and/or encoded by the nucleotide sequence of SEQ ID NO: 1795), and/or human apolipoprotein E-II receptor binding domain (e.g., comprising the amino acid sequence of 1798 and/or encoded by the nucleotide sequence of SEQ ID NO: 1797).

### Example 4. CMA Recognition Sequences Enhance Intracellular Lysosomal Targeting

[1067] Viral genomes encoding a GBA protein can also be designed to further encode an enhancement element, e.g., a lysosomal targeting sequence or functional variant thereof.

[1068] Chaperone sequences including glycosylation-independent lysosomal targeting peptides (which is an M-6-P independent lysosomal targeting mechanism) have demonstrated ability to enable enhanced delivery of lysosomal enzyme product. GBA utilizes LIMP-2 (encoded by SCARB2 gene) as the lysosomal surface receptor (important for lysosomal localization). Co-delivery of SCARB2 with GBA provides an alternative strategy to enhance lysosomal targeting of GCase. Chaperone-mediated autophagy signals are incorporated into transgenes of the disclosure to increase lysosomal targeting of the GCase enzyme. Highly conserved recognition sequences of chaperone-mediated-autophagy (CMA) pathway is analyzed for improved lysosomal targeting of GCase enzyme. Such sequences include, for example, RNase A-derived CMA recognition sequence, HSC70-derived CMA recognition sequence, or hemoglobin-derived CMA recognition sequence.

[1069] Lysosomal targeting sequences (LTS) are also included in viral genomes encoding a GBA protein described herein. Exemplary LTS peptides used herein include LTS1 (e.g., comprising the amino acid sequence of SEQ ID NO 1800 and/or encoded by the nucleotide sequence of SEQ ID NO: 1799), LTS2 (e.g., comprising the amino acid sequence of SEQ ID NO 1802 and/or encoded by the nucleotide sequence of SEQ ID NO: 1801), LTS3 (e.g., comprising the amino acid sequence of SEQ ID NO 1804 and/or encoded by the nucleotide sequence of SEQ ID NO: 1803), LTS4 (e.g., comprising the amino acid sequence of SEQ ID NO 1806 and/or encoded by the nucleotide sequence of SEQ ID NO: 1805), and/or LTS5 (e.g., comprising the amino acid sequence of SEQ ID NO 1808 and/or encoded by the nucleotide sequence of SEQ ID NO: 1807).

### Example 5. Combinatorial Enhancements

[1070] Combinations of the aforementioned enhancement elements (Examples 2-4) are tested for ability of different combinations to additively or synergistically increase potency of AAV mediated delivery of GCase enzyme in vivo (by various possible combinations of enhanced cross-correction, enhanced lysosomal targeting, enhanced catalytic activity). These combinatorial approaches are also compared against a reference transgene (SEQ ID NO: 1759) for various aforementioned outcomes. Without wishing to be bound by theory, it is believed that transgene-level enhancements can increase the potency of AAV gene therapy and reduce the minimal efficacious dose for in vivo evaluations and clinic applications.

### Example 6. In Vitro Screen

[1071] Early in vitro experiments are designed to enable validation of the functional enhancements made in the GBA transgene by conducting side-by-side comparison against a reference GBA construct (e.g., SEQ ID NO: 1759). Experiments are run as AAV vectorized transduction studies on in vitro models of GBA LOF (patient fibroblasts or GBA knockout mouse primary neurons). Dose response is determined. Post-translational modifications and activity of the final GCase product can also be determined.

[1072] In vitro evaluations with AAV vectors packaging wtGBA, enGBA and enGBAcombo are carried out on patient fibroblasts with GBA mutations and primary neurons derived from WT and/or 4L/PS-NA GBA mouse model. In preparation for generating 3-point dose-response curves of all AAV.GBA vectors generated, AAV6.CBA.Luciferase reporter-gene transduction assay is performed on the 2 cell lines to verify optimal experimental conditions, e.g. Multiplicity Of Infection (MOI) for AAV6 vectors to be applied across in vitro screening. Once the in vitro experiments are optimized, head-to-head comparisons to identify optimal enGBA transgene configurations for further in vivo evaluations can be conducted.

[1073] In vitro dose-response comparisons of AAV-enGBA or AAV-wtGBA constructs (e.g., any one of SEQ ID NOs: 1759-1771 or 1809-1828, e.g., as described in Tables 18-21 or 29-32) for GCase activity: To determine if GBA transgene enhancement strategies confer increased GCase activity in disease-relevant in vitro models, human fibroblasts with and without GBA mutations, and WT/GBA mutant mouse primary neurons are treated with AAV6 vectors packaging enhanced GBA viral genome variants at 3 different MOIs. At terminal time point, secreted and intracellular GCase expression and activity are measured in both media and cell lysate. Additionally, ddPCR based vector genome analysis is conducted to ensure successful in vitro gene transfer across different conditions.

[1074] In vitro comparison of AAV-enGBA constructs for subcellular localization: Whether the GBA transgene enhancement strategies confer increased lysosomal localization properties in healthy and disease relevant in vitro models is determined. Human fibroblasts with/without GBA mutations; and WT/GBA mutant mouse primary neurons are treated with AAV6 vectors packaging enhanced GBA viral genome variants. At terminal time point, cells are fixed and co-immunostained for HA (AAV transduction) and lysosomal markers (e.g. Lamp1). Transduction efficiency and % colocalization in the lysosomes are assessed for all AAV vectors using the Bio-Tek Cytation 5 for image analysis and quantification.

[1075] In vitro comparison of AAV-enGBA constructs for enzyme cross-correction: In addition to intracellular and secreted GCase activity, AAV-GBA transgene enhancement strategies are assessed for cross-correction properties in disease relevant in vitro conditions. Non-GBA/GBA human fibroblasts and GBA mutant/WT mouse primary neurons are treated with AAV6 vectors packaging enhanced GBA viral genomes. Conditioned media from transduced cells is collected at 24-, 48- and 72-hours post AAV treatments. In order to recapitulate in vivo cross-correction, untreated human fibroblasts and mouse primary neurons are then treated with different conditioned media for 24 hours. At this point, a subset of wells is co-immunostained for HA (visualization of cross-corrected GCase protein product) and lysosomal markers (e.g. Lamp1). Another subset of wells is lysed and evaluated for GCase activity. Cross-correction efficiency and % colocalization in the lysosomes is visualized and quantified for all AAV vector treatments.

[1076] In vitro GBA MOI dose-response study with AAVwtGBA and AAVenGBA vectors: Small-scale preps of optimal AAV capsid packaging wtGBA and enGBA constructs. A 3-point dose-response infection study is conducted with wtGBA and enGBA packaging AAVs. GBA-KO neuroblastoma cells (wtGBA neuroblastoma control) and Gaucher disease patient fibroblasts (healthy controls) are used for evaluations.

[1077] Select wtGBA or enGBA constructs are identified for further analysis in vivo.

### Example 7. Assay Development

[1078] One method of detecting GCase activity involves measuring turnover of an artificial substrate, 4-Methylumbelliferyl β-D-galactopyranoside (4-MUG) as described, for example in Rogers et al., “Discovery, SAR, and biological evaluation of non-inhibitory chaperones of glucocerebrosidase.” (2010), incorporated herein by reference in its entirety. The 4-MUG assay is used to determine GCase activity and GCase concentration in cell lysates.

[1079] Another method of detecting GCase activity involves use of a SensoLyte Blue Glucocerebrosidase assay (AnaSpec, Fremont, Calif.), a fluorometric assay, according to the manufacturer's instructions. Sensolyte Blue Glucocerebrosidase assay detects GCase activity using a fluorogenic analog-substrate, wherein the output is fluorescent excitation/emission at 365 nm/445 nm on a standard plate reader.

[1080] Fluorescence-based detection of hGBA in mouse tissue, and assessment of hGCase activity in mouse can be determined using the methods as described in Morabito, Giuseppe et al., “AAV-PHP. B-mediated global-scale expression in the mouse nervous system enables GBA gene therapy for wide protection from synucleinopathy.” Molecular Therapy 25.12 (2017): 2727-2742, the contents of which are incorporated by reference herein in their entirety. Alternative methods of visualizing GCase activity are described, for example, in Chao, Daniela Herrera Moro et al., “Visualization of active glucocerebrosidase in rodent brain with high spatial resolution following in situ labeling with fluorescent activity based probes.” PLoS One 10.9 (2015), the contents of which are incorporated herein by reference in their entirety. See also Witte, Martin D., et al. Nature Chemical Biology 6, 907-13 (2010), incorporated herein by reference in its entirety, describing “ultra-sensitive” cyclophellitol β-oxide (CBE) based probes for highly specific GBA labeling in vitro and in vivo. CBE, a GCase inhibitor, irreversibly binds GBA and inhibits its GCase activity, has been shown to cross the blood-brain-barrier, and induces biochemical, clinical and histological manifestations of Gaucher disease (Kuo, Chi-Lin, et al. “In vivo inactivation of glycosidases by conduritol B epoxide and cyclophellitol as revealed by activity-based protein profiling.” The FEBS journal 286.3 (2019): 584-600, incorporated herein by reference in its entirety).

[1081] For these assays, GCase/GBA protein concentration and activity are determined and normalized to total protein/activity levels in lysate. Negative control lysates are prepared from, for example, hippocampus and brainstem of vehicle (PBS) treated 6-8 week C57/B16 female mice (n=4). Positive control lysates are from human recombinant GBA-infected/expressing cells. Inhibitor control lysates are from human recombinant GBA+GBA-inhibitor infected/expressing cells to test specificity of the enzyme. An example GCase inhibitor for use in such studies is CBE. Vehicle/Lysis buffer/matrix controls consist of lysis buffer (Sigma) and substrate only. Background controls consist of substrate only. Minimal protein concentrations needed to observe GCase activity are identified by analysis of additional dilutions of lysate.

[1082] An assay is validated for evaluating increase in glucosylceramidase activity and glucosylceramidase protein concentration within in vitro GBA disease models (Gaucher patient fibroblasts and GBA-KO neuroblastoma cells) post AAV administration.

### Example 8. In Vivo Screen

[1083] In vivo target engagement in GBA disease model: After in vitro screening, target engagement in a GBA mouse model (GBA-4L/PS-NA) is demonstrated. A side-by-side comparison with AAV-wtGBA can be used to further bolster findings and demonstrate efficacy in vivo. In vivo evaluations determine whether AAV9-enGBA and AAV9-enGBAcombo candidate treatments selected during in vitro evaluations result in comparable/significantly higher GCase activity and reduction in GluCer and Glucosylsphingosine substrate-level reduction benefit as compared to AAV9-GBA reference construct in GBA a mouse model.

[1084] Up to 10 top enGBA constructs with significantly favorable attributes as compared to GBA reference construct using the GBA 4L/PS-NA mouse model (available at QPS) are tested. AAV-untreated non transgenic (NT) mice are used as controls for biochemical analyses. GBA-4L/PS-NA mice show relevant features of human GBA mutations including significantly reduced GCase activity and increased Glucosylceramide and Glucosylsphingosine as early as 5 weeks post birth. Neuroinflammation in the CTx and hippocampus is also seen in these mice.

[1085] In order to assess target engagement in the GBA disease model, intrastriatal administration of AAV9 vectors packaging GBA reference construct and up to top 10 of the enhanced GBA variant viral genomes at three doses 5×10⁹, 1×10¹⁰, 5×10¹⁰ vg/inj via bilateral injections is performed. Animals are euthanized 4 weeks post injections and CNS, peripheral tissues, and fluid compartments (serum and CSF) are collected for AAV biodistribution and transduction (GCase activities and GluCer substrate levels) analyses. Successful/lead candidates cause modest increase (˜30% over baseline) of GCase activity in GBA animal models. Untreated strain- and age-matched WT mice are included to compare physiological levels of GCase and GluCer in healthy animals. Thus, intrastriatal enGBA/enGBAcombo treatments result in equivalent/superior physiological restoration of GCase enzyme levels in the CNS tissues and CSF of GBA mutant mice as compared to GBA reference construct. Concomitantly similar comparison is also made for Glucosylceramide or Glycosylsphingosine levels for different treatments for substrate reduction. Up to 3 top AAV9-enGBA treatments are advanced for efficacy studies.

### Example 9. In Vivo Efficacy Evaluations

[1086] Dose selection: In vivo target engagement hits identified in Examples 2-5 are evaluated for GCase expression, target engagement, and efficacy based on readouts in murine disease models of GBA-PD. For efficacy determining in vivo studies, both GBA-4L/PS-NA and SNCA-A53T (M83) mice are used; WT animals are compared as controls. Both mouse models (GBA-4L/PS-NA and M83), n=6-10 mice per group, receive bilateral intrastriatal injections of 5×10⁹, 1×10¹⁰, 5×10¹⁰ vg/inj (or other appropriate concentration based on study results) of the top hits. Mice are euthanized 4 or 8 weeks post-dose. CNS and peripheral tissues and fluid samples including cortex, striatum, thalamus, brain stem, cerebellum, CSF, serum and liver are collected. GCase expression and activity and GluCer substrate levels are measured. Early immunohistochemical readouts using Iba1, GFAP, and H&E stains of mouse brain, spinal cord and liver are performed in order to confirm tolerability at various AAV doses.

[1087] Efficacy evaluations will determine whether AAV-enGBA candidate treatments result in efficacious and sustained increase in GCase activity in the brain resulting in reduction in GCase substrate within GBA-4L/PS-NA mouse model. Based on dose selection studies, AAV vectors that are well-tolerated and showing >30% increase in GBA protein expression in relevant CNS tissues are further tested in a time-response study. Briefly, GBA-4L/PS-NA mice (n=6-10) are injected with an intrastriatal injection of lead constructs (dose determined based on dose-selection study), multiple CNS and peripheral tissues and fluid compartments (serum and CSF) are collected at various time-points (e.g. 4, 8 and 12 weeks) and GCase expression and activities, substrate reduction in the CNS and periphery are quantified. Lysosomal localization of the transduced GCase enzyme product are confirmed with immune-colocalization of AAV transduction with lysosomal marker.

[1088] Further evaluations will assess whether AAV-enGBA candidate treatments result in efficacious and sustained increase in GCase activity in the brain resulting in reduction of α-Syn pathology within GBA1/α-Synuclein A53T mouse model. Based on dose selection study, AAV vectors that are well-tolerated and showing >30% increase in GBA protein expression in relevant CNS tissues are further tested in SNCA-A53T (M83) mouse model. M83 mice are known to start developing α-syn pathology at 6-7 months of age with progressive motor deficits. M83 mice (n=8-12) are injected with most efficacious constructs (Intrastriatal; dose according to study results) at ˜6 months of age; and evaluated for GCase expression and activity, and α-syn pathology 3 months post administration. Previous studies have shown therapeutic benefit of AAV-GBA in reducing α-syn aggregates in SNCA transgenic mouse models. Here, in addition to GCase expression and activities, AAV-enGBA candidate treatments which result in physiological restoration of GCase enzyme levels (>30%) in the CNS tissue and CSF are evaluated for α-syn pathology reduction in A53T (M83) mice using immunohistochemical analyses.

### Example 10. Natural History Study

[1089] In parallel with Stage 1 screening efforts, phenotypic, biochemical and immunohistochemical analysis were performed on 4L/PS-NA, 4L control, and wild-type mice to establish disease-relevant efficacy readouts and timelines.

[1090] GBA and Saposin C expression levels were determined in forebrain, midbrain, and hindbrain sections of the mice by LC-MS/MS, and were normalized to actin levels. Consistently across 5, 12, and 18 weeks of age, in all regions of the brain, 4L/PS-NA mice had lower GBA expression levels compared to that of wild-type mice and similar levels of GBA expression as 4L mice (Table 23). The brain of wild-type mice generally showed a trend of increased GBA expression in the hindbrain relative to the midbrain the forebrain (Table 23). Additionally, a decrease in GBA levels in the forebrain and midbrain was observed in the wild-type mice between 5 weeks and 12-18 weeks of age.

TABLE 23
Avg. GBA level (GBA/Actin) in GBA-related disease mouse models

| | 5 Weeks | | | 12 Weeks | | | 18 Weeks | | |
|---|---|---|---|---|---|---|---|---|---|
| | Region of Brain | | | Region of Brain | | | Region of Brain | | |
| Animal | Fore- | Mid- | Hind- | Fore- | Mid- | Hind- | Fore- | Mid- | Hind- |
| Model | brain | brain | brain | brain | brain | brain | brain | brain | brain |
| 4L/PS- | 473.5 | 715.2 | 996.7 | 591.0 | 760.5 | 779.0 | 801.8 | 726.6 | 907.6 |
| NA | | | | | | | | | |
| 4L | 687.5 | 676.8 | 939.8 | 614.5 | 764.9 | 702.8 | 512.3 | 691.8 | 1094.2 |
| Control | | | | | | | | | |
| Wild- | 3463.2 | 3644.1 | 5377.4 | 2616.6 | 2902.2 | 4468.3 | 2551.3 | 3273.6 | 5129.8 |
| type | | | | | | | | | |

[1091] Saposin C (SapC)/Actin levels in 4L/PS-NA mice were lower than those observed in the 4L or wild-type mice in the forebrain, midbrain, and hindbrain (Table 24). SapC levels increased in the brains of wild-type mice, with the highest level quantified at 18 weeks of age (Table 24).

TABLE 24
Avg. SapC level (SapC/Actin) in GBA-related disease mouse models

| | 5 Weeks | | | 12 Weeks | | | 18 Weeks | | |
|---|---|---|---|---|---|---|---|---|---|
| | Region of Brain | | | Region of Brain | | | Region of Brain | | |
| Animal | Fore- | Mid- | Hind- | Fore- | Mid- | Hind- | Fore- | Mid- | Hind- |
| Model | brain | brain | brain | brain | brain | brain | brain | brain | brain |
| 4L/PS- | 232.1 | 289.6 | 430.6 | 315.8 | 432.1 | 523.3 | 227.5 | 552.8 | 591.4 |
| NA | | | | | | | | | |
| 4L | 748.6 | 1102.9 | 1769.3 | 844.2 | 1486.5 | 1506.3 | 646.5 | 1123.6 | 1546.4 |
| Control | | | | | | | | | |
| Wild- | 1500.3 | 2283.3 | 3087.9 | 1662.3 | 1971.0 | 2968.9 | 1656.3 | 2143.9 | 3253.1 |
| type | | | | | | | | | |

[1092] At five-weeks, 12 weeks, and 18 weeks of age, GCase activity also was measured in forebrain, midbrain and hindbrain tissue sections of 4L/PS-NA (model having decreased GCase and prosaposin), 4L control (model having decreased GCase) and wild-type (normal GCase and prosaposin) mice (Table 7).

[1093] At 5 weeks of age, decreased GCase activity was confirmed in both the 4L/PS-NA and 4L control mice, with significant GCase deficits as compared to wild-type mice. GCase activity was not significantly different between the 4L/PS-NA and 4L control mice (Table 7).

TABLE 7
Avg. GCase activity [RFU per mL] in GBA-related disease mouse models

| | 5 Weeks | | | 12 Weeks | | | 18 Weeks | | |
|---|---|---|---|---|---|---|---|---|---|
| | Region of Brain | | | Region of Brain | | | Region of Brain | | |
| Animal | Fore- | Mid- | Hind- | Fore- | Mid- | Hind- | Fore- | Mid- | Hind- |
| Model | brain | brain | brain | brain | brain | brain | brain | brain | brain |
| 4L/PS- | 4318.36 | 6448.92 | 5581.51 | 6343.1 | 6423.7 | 5386.7 | 4109.2 | 6466.4 | 5981.6 |
| NA | | | | | | | | | |
| 4L | 4442.15 | 5614.69 | 5598.62 | 4969.0 | 4640.2 | 6798.4 | 5837.2 | 5915.6 | 8310.4 |
| Control | | | | | | | | | |
| Wild- | 9531.29 | 10448.20 | 10520.70 | 8379.2 | 7596.1 | 9286.1 | 5488.1 | 9730.8 | 8227.2 |
| type | | | | | | | | | |

[1094] Similarly, in 12 and 18 weeks old mice, decreased GCase activity was quantified in both the 4L/PS-NA and 4L control mice, with significant GCase deficits as compared to wild-type mice (Table 7). GCase activity was also not significantly different between the 4L/PS-NA and 4L control mice at 12 and 18 weeks of age (Table 7).

[1095] Also, at five-weeks, 12 weeks, and 18 weeks of age, GBA substrate levels, specifically glucosylsphingosine (GlcSph) and glucosylceramide (GlcCer), were measured by LC-MS/MS in forebrain, midbrain and hindbrain tissue sections of 4L/PS-NA (model having decreased GCase and prosaposin), 4L control (model having decreased GCase) and wild-type (normal GCase and prosaposin) mice and normalized to actin. As shown in Table 25, the greatest increase in GlcSph levels was observed in the brains of the 4L/PS-NA mice followed by 4L-control mouse brains, relative to the wild-type mouse. Additionally, GlcSph levels in the 4L/PS-NA mouse brains and 4L control mouse brains increased with age and higher levels were observed in the hindbrain, as compared to the forebrain or midbrain. These data demonstrate the effects of reduced GCase activity and decreased GBA levels in these mice, as measured above.

TABLE 25
Avg. glucosylsphingosine level (GlcSph/Actin) in GBA-related disease mouse models

| | 5 Weeks | | | 12 Weeks | | | 18 Weeks | | |
|---|---|---|---|---|---|---|---|---|---|
| | Region of Brain | | | Region of Brain | | | Region of Brain | | |
| Animal | Fore- | Mid- | Hind- | Fore- | Mid- | Hind- | Fore- | Mid- | Hind- |
| Model | brain | brain | brain | brain | brain | brain | brain | brain | brain |
| 4L/PS- | 1086.1 | 1050.9 | 1384.0 | 1792.6 | 1897.0 | 2543.6 | 2571.0 | 3113.1 | 5672.8 |
| NA | | | | | | | | | |
| 4L | 268.0 | 317.0 | 308.7 | 404.5 | 435.2 | 520.1 | 465.8 | 453.4 | 455.1 |
| Control | | | | | | | | | |
| Wild- | 0 | 0 | 0 | 0 | 0 | 0 | 0 | 0 | 0 |
| type | | | | | | | | | |

[1096] As shown in Table 26, the levels of GlcCer was increased in the 4L/PS-NA mouse brains, and the levels were higher in the hindbrain as compared to the forebrain and the midbrain. Levels of GlcCer were also higher at 18 weeks of age in the 4L/PS-NA mouse brains. These data also support the effects of reduced GCase activity and decreased GBA levels in these mice, as measured above.

TABLE 26
Avg. glucosylceramide (GlcCer) 18:1/18:0/Actin in GBA-related disease mouse models

| | 5 Weeks | | | 12 Weeks | | | 18 Weeks | | |
|---|---|---|---|---|---|---|---|---|---|
| | Region of Brain | | | Region of Brain | | | Region of Brain | | |
| Animal | Fore- | Mid- | Hind- | Fore- | Mid- | Hind- | Fore- | Mid- | Hind- |
| Model | brain | brain | brain | brain | brain | brain | brain | brain | brain |
| 4L/PS- | 2179.2 | 1875.6 | 2247.5 | 7894.8 | 6425.0 | 12123.0 | 14774.5 | 15368.6 | 25601.5 |
| NA | | | | | | | | | |
| 4L | 695.8 | 528.6 | 454.7 | 703.2 | 547.7 | 488.9 | 738.6 | 627.3 | 545.8 |
| Control | | | | | | | | | |
| Wild- | 510.4 | 361.9 | 332.2 | 375.6 | 359.0 | 355.7 | 517.9 | 439.6 | 374.2 |
| type | | | | | | | | | |

[1097] Taken together, these data support use of the 4L/PS-NA mice as model for neuropathic Gaucher disease, and for assessing efficacy of viral constructs encoding a GBA protein e.g., constructs GBA_VG1-GBA_VG34, e.g., as described in Tables 18-21 or 29-32 above.

### Example 11: Exemplary Lead Identification

[1098] A. Generation of wild-type and enhanced GBA viral genome variants

[1099] Viral genomes were designed for AAV delivery of a GBA protein, e.g., a wild-type GBA protein (wtGBA) that does not further comprise an enhancement element; or an enhanced GBA protein (enGBA) that further comprises an enhancement element described herein, e.g., a prosaposin protein, a SapC protein, or functional variant thereof; a cell penetrating peptide (e.g., an ApoEII peptide, a TAT peptide, and/or an ApoB peptide) or functional variant thereof; a lysosomal targeting signal (LTS) or functional variant thereof; or a combination thereof (enGBAcombo). The nucleotide sequence from 5′ ITR to 3′ ITR of the viral genome constructs that comprise a transgene encoding an GBA protein with or without an enhancement element, are provided as GBA_VG1-GBA_VG33 herein, which are SEQ ID NOs: 1759-1771, 1809-1828, or 1870, respectively. These constructs are also summarized in Table 18, as well as Tables 19-21 and 29-32.

[1100] Each of these viral genome constructs comprise a nucleic acid comprising a transgene encoding a GBA protein. The transgene was designed to comprise a wild type nucleotide sequence encoding GBA (SEQ ID NO: 1777), or one of two different codon optimized nucleotide sequence encoding a GBA protein, SEQ ID NO: 1773 or 1781. In designing these viral genome constructs for expression of GBA, several promoters were selected and tested (e.g., promoters as described in Table 5), including a CMV promoter (SEQ ID NO: 1833); a CMVie enhancer and a CMV promoter (SEQ ID NO: 1831 and 1832, respectively); a CMVie enhancer and a CBA promoter (SEQ ID NO: 1831 and 1834 respectively); or an EF-1α promoter variant (SEQ ID NOs: 1839 or 1840).

[1101] Some of the viral genome constructs further comprised an intron region, of SEQ ID NO: 1842; a nucleotide sequence encoding a signal sequence (SEQ ID NO: 1850, 1851, or 1852); and/or 4 copies of a miR183 binding site (SEQ ID NO: 1847) separated by a spacer (SEQ ID NO: 1848), or miR183 binding series (SEQ ID NO: 1849). The viral constructs comprised a 5′ ITR of SEQ ID NO: 1829; and a 3′ ITR of SEQ ID NO: 1830. The polyadenylation sequence (SEQ ID NO: 1846) was the same across all viral genome constructs designed.

[1102] Wild-type GBA viral genome variants encoding a GBA protein were prepared as described and are outlined in Table 18-21 or 29-32 (e.g., GBA_VG1, GBA_VG17-GBA_VG21, GBA_VG26, and GBA_VG33; SEQ ID NOs: 1759, 1812-1816, 1821, and 1828).

[1103] Enhanced GBA viral genome variants encoding a GBA protein and an enhancement element described herein (e.g., an enhancement element of Table 4 or 16) were prepared and are outlined in Table 18 (GBA_VG2-GBA_VG16, GBA_VG22-GBA_VG25, GBA_VG27-GBA_VG32; SEQ ID NO: 1760-1771, 1809-1811, 1817-1820, 1822-1827). The enhanced viral genomes were designed to further encode an enhancement element comprising a prosaposin protein (encoded by SEQ ID NO: 1859); saposin C protein or a functional variant (encoded by SEQ ID NO: 1787 or 1791); a cell penetrating peptide, including an ApoEII peptide (encoded by SEQ ID NO: 1797), a TAT protein (encoded by SEQ ID NO: 1793), or an ApoB peptide (encoded by SEQ ID NO: 1795); a lysosomal targeting signal (LTS) (encoded by any of SEQ ID NOs: 1799, 1801, 1803, 1805, or 1807); or a combination thereof. Some of the enhanced viral genome constructs further comprise a nucleotide sequence encoding a signal sequence (e.g., SEQ ID NO: 1856), and/or a linker (e.g., SEQ ID NO: 1724, 1726, or 1730). Some constructs, e.g., those encoding a prosaposin protein or a saposin C protein, encode a cleavable linker such as a furin and/or T2A cleavage site (encoded by SEQ ID NO: 1724 or 1726, respectively). Some constructs, e.g., those encoding a cell penetrating peptide, encode a flexible, glycine-serine linker (encoded by SEQ ID NO: 1730).

[1104] The viral construct GBA_VG1 (SEQ ID NO: 1759), comprising the nucleotide sequence of SEQ ID NO: 1781, with no additional enhancement elements (e.g., a saposin protein, a lysosomal targeting sequence, a cell penetrating sequence, or a combination thereof) was used as a reference or benchmark construct, e.g., in the experiments described herein.

[1105] B. In-vitro assessment of payload expression

[1106] Prior to vectorization, the wild-type and enhanced GBA viral genome variants were first used to validate the tools necessary for conducting lead identification studies, such as, but not limited to assays and cell-systems.

[1107] LC-MS/MS assays were established to quantify GBA (ng/mg of total protein) and SapC (ng/mg of total protein) in lysates collected from HEK293 cells transfected with a wild-type or enhanced GBA viral genome variant plasmid DNA including, GBA_VG1 (SEQ ID NO: 1759, encoding a GBA protein), GBA_VG8 (SEQ ID NO: 1766, encoding a GBA protein and a prosaposin protein of SEQ ID NO: 1785), GBA_VG9 (SEQ ID NO: 1767, encoding a GBA and a Saposin C protein of SEQ ID NO: 1789) and GBA_VG10 (SEQ ID NO: 1768, encoding a GBA protein and a Saponin C protein of SEQ ID NO: 1758). Lysates were also run on Western blot to confirm the presence of expressed GBA.

[1108] These validation experiments demonstrated that transfection of cells with the wild-type or enhanced GBA variant construct DNA resulted in increases in measured GBA or SapC in the lysate as determined by LC-MS/MS and Western blot when compared to lysate of untransfected cells.

[1109] C. In-vitro cell-system assessment and validation

[1110] Additional LC-MS/MS assays were used to quantify GCase activity and/or levels of GBA substrates (e.g., glycosphingolipids (GlcSph) quantified as ng/mg Actin in the FIG. 1A, or as ng/mg Lamp 1 in FIG. 1B) in Gaucher disease patient derived (GM04394-fibroblast (GD1 patient), GM00852-fibroblast (GD1 patient), GM00877-fibroblast (GD2 patient) or healthy control (GM05758-fibroblast from skin/inguinal area and GM02937-fibroblast from skin/unspecified) fibroblasts. Again, these quantifications were supplemented with Western blot analyses.

[1111] As anticipated, GBA substrate levels, specifically glycosphingolipids, as quantified as ng/mg Actin in FIG. 1A, or as ng/mg Lamp 1 in the in FIG. 1B, were increased across all three Gaucher disease patient derived fibroblast samples, as compared to control fibroblast levels, when measured by LC-MS/MS (FIGS. 1A-1B). Meanwhile, GBA protein detection (measured as the concentration of GBA in the cell lysate relative to total protein (ng/mg total protein) in GD patient fibroblasts was decreased compared to the healthy controls (FIG. 1C).

[1112] Quantification of GCase activity in lysate collected from Gaucher disease patient derived fibroblasts transfected with enhanced GBA viral genome variants was measured as Relative Fluorescence units per ng protein (RFU per ng protein) and was shown to be decreased when by 96.5%, 98.4% and 99.2% (GM04394-fibroblast, GM00852-fibroblast, GM00877-fibroblast, respectively) as compared to an average of the normal controls. Data are shown below in Table 8.

TABLE 8
Avg. GCase activity[RFU per ng protein] in
Gaucher disease patient derived fibroblasts

| Fibroblast cell line | GCase activity |
|---|---|
| GM04394 | 465.53 |
| GM00852 | 221.29 |
| GM00877 | 109.44 |
| GM05758 (Control) | 14997.59 |
| GM02937 (Control) | 11750.07 |

[1113] Quantification of GBA substrate in lysate collected from Gaucher disease patient derived fibroblasts transfected with enhanced GBA viral genome variants was measured as glucosylsphingosine/Lamp1 (ng/mg Lamp1) and was shown to be increased when compared to control. Data are shown below in Table 9.

TABLE 9
Avg. glucosylsphingosine (ng/mg Lamp1) in
Gaucher disease patient derived fibroblasts

| Fibroblast cell line | Glucosylsphingosine |
|---|---|
| GM04394 | 716.33 |
| GM00852 | 710.67 |
| GM00877 | 4348.00 |
| GM05758 (Control) | 146.00 |
| GM02937 (Control) | 134.5 |

[1114] D. In-vitro packaging into AAV particles and capsid selection

[1115] The wild-type and enhanced GBA viral genome variants (GBA_VG1 to GBA_VG13; SEQ ID NO: 1759-SEQ ID NO: 1771) were each packaged into AAV2 or AAV6 capsids.

[1116] In vitro capsid selection studies were conducted wherein cells were transduced with AAV particles comprising an enhanced GBA viral genome variant packaged in AAV2 or AAV6 at a series of increasing MOIs (1.00E1, 1.00E2, 1.00E3, 1.00E4, 1.00E5 and 1.00E6) and vector genome per cell quantified. Based on transduction efficiency, AAV2 was selected for further studies.

[1117] E. In-vitro dose-range finding studies

[1118] AAV particles comprising reference viral genome GBA_VG1 (SEQ ID NO: 1759) was screened in a dose-range finding study, wherein GCase activity was quantified subsequent to transduction of cells with an increasing series of MOIs (1.00E1, 1.00E2, 1.00E3, 1.00E4, 1.00E5 and 1.00E6). Based on these findings, a mid-range MOI of 1.00E3 was selected for further studies.

[1119] F. AAV2-GBA transduction in Gaucher Disease patient fibroblast cells

[1120] AAV2-GBA particles comprising viral genomes GBA_VG1 (SEQ ID NO: 1759), GBA_VG2 (SEQ ID NO: 1760), GBA_VG3 (SEQ ID NO: 1761), GBA_VG4 (SEQ ID NO: 1762), GBA_VG5 (SEQ ID NO: 1763), GBA_VG6 (SEQ ID NO: 1764), GBA_VG7 (SEQ ID NO: 1765) were administered at MOI 1.00E3 to Gaucher disease patient fibroblasts (GM00877-fibroblasts) and GCase activity quantified and normalized to mg protein. The results are shown in Table 10 below.

TABLE 10
GCase activity in Gaucher disease patient fibroblasts

| | | GCase Activity |
|---|---|---|
| Construct ID | SEQ ID NO: | [RFU per mL] |
| GBA_VG1 | 1759 | 9814.48 |
| | | 16616.84 |
| | | 3686.62 |
| | | 3478.15 |
| Avg. | | 8399.02 |
| GBA_VG2 | 1760 | 6375.98 |
| | | 3150.89 |
| | | 7426.56 |
| | | — |
| Avg. | | 5651.14 |
| GBA_VG3 | 1761 | 11580.6 |
| | | 22812.97 |
| | | 14152.31 |
| | | — |
| Avg. | | 16181.96 |
| GBA_VG4 | 1762 | 10963.45 |
| | | 11695.58 |
| | | 7980.39 |
| | | — |
| Avg. | | 10213.14 |
| GBA_VG5 | 1763 | 17076.48 |
| | | 8665.12 |
| | | 16343.61 |
| | | — |
| Avg. | | 14028.40 |
| GBA_VG6 | 1764 | 5117.13 |
| | | 3391.47 |
| | | 4177.62 |
| | | — |
| Avg. | | 4228.74 |
| GBA_VG7 | 1765 | 9842.00 |
| | | 9366.20 |
| | | 13187.36 |
| | | — |
| Avg. | | 10798.52 |

[1121] Western blot analysis further confirmed a ˜70 kD mature GBA protein in those samples transduced with AAV2-enhanced GBA particles. Negligible GBA was evident in Gaucher disease patient derived fibroblast samples that had not been transduced with an AAV2-enhanced GBA particle.

[1122] Additional AAV2 particles comprising viral genome constructs encoding a GBA protein and an enhancement element such as saposin C protein, a lysosomal targeting signal (LTS), a cell penetrating peptide (CPP), or a combination thereof (e.g., as outlined in Table 18 above), were vectorized for screening at an MOI of 10³⁵ in Gaucher disease (GD) patient-derived fibroblasts (GD-II GM00877). The vectorized viral genome constructs included GBA_VG1 (SEQ ID NO: 1759), GBA_VG9 (SEQ ID NO: 1767), GBA_VG10 (SEQ ID NO: 1768), GBA_VG11 (SEQ ID NO: 1769), GBA_VG6 (SEQ ID NO: 1764), GBA_VG7 (SEQ ID NO: 1765), GBA_VG12 (SEQ ID NO: 1770), GBA_VG3 (SEQ ID NO: 1761), GBA_VG4 (SEQ ID NO: 1762), GBA_VG5 (SEQ ID NO: 1763), and GBA_VG13 (SEQ ID NO: 1771). GCase activity was quantified in the pelleted patient cells (FIG. 2A) and the corresponding conditioned media (FIG. 2B), as relative fluorescence units per mg protein (RFU per mg protein). Treatment with six of the vectorized viral genome constructs (GBA_VG9, GBA_VG6, GBA_VG7, GBA_VG3, GBA_VG4, and GBA_VG5) resulted in an increase in GCase activity measured in the pelleted GD patient fibroblasts (FIG. 2A) and the corresponding conditioned media (FIG. 2B).

[1123] An LC-MS/MS assay was then used to quantify levels of the GBA substrate glycosylsphingosine (GlcSph, ng/mg Lamp1) in the cell lysis from GD II patient-derived fibroblasts transduced with the viral genomes constructs GBA_VG1 (SEQ ID NO: 1759), GBA_VG9 (SEQ ID NO: 1767), GBA_VG6 (SEQ ID NO: 1764), GBA_VG7 (SEQ ID NO: 1765), GBA_VG3 (SEQ ID NO: 1761), GBA_VG4 (SEQ ID NO: 1762), and GBA_VG5 (SEQ ID NO: 1763) vectorized in AAV2 particle. As shown in FIG. 3, the buildup of GBA substrate levels was reduced significantly in GD patient-derived fibroblasts transduced with the AAV2 GBA vectors, compared to the no AAV control. The data demonstrated that the AAV-mediated gene therapy can be effective in increasing GCase activity to treat diseases associated with GBA deficiency.

### Example 12: AAV2 Enhanced GBA Vectors Containing Combinations of Enhancement Elements

[1124] Additional viral genome constructs were generated encoding a GBA protein, wherein the GBA protein is encoded by the wild-type nucleotide sequence of SEQ ID NO: 1777, or the codon optimized nucleotide sequence of SEQ ID NO: 1773, and further encoding an enhancement element such as a cell penetration peptide (CPP) (e.g., ApoEII), a lysosomal targeting sequence (e.g., LTS2), a SapC protein, or combination thereof. These constructs also comprised different promoters, including a CBA, a CMV, or a CAG promoter. These exemplary GBA viral genome constructs are included in Table 18-20.

[1125] GD-II patient fibroblasts (GM00877) were transduced with an AAV2 vector comprising the viral genome constructs: GBA_VG1 (SEQ ID NO: 1759), GBA_VG14 (SEQ ID NO: 1809), GBA_VG15 (SEQ ID NO: 1810), GBA_VG16 (SEQ ID NO: 1811), GBA_VG17 (SEQ ID NO: 1812), GBA_VG18 (SEQ ID NO: 1813), GBA_VG19 (SEQ ID NO: 1814), and GBA_VG20 (SEQ ID NO: 1815), at an MOI of 10²⁵ (first bar), 10³ (second bar), 10³⁵ and 10⁴. The GCase activity was quantified on day 7 post-transduction after lysing the treated patient cells (FIG. 4A), as relative fluorescence units per mg protein (RFU per mg protein As shown in FIG. 4A, all viral genome constructs tested resulted in a dose-responsive increase in GCase activity in GD II patient-derived fibroblasts. The GBA_VG20 construct comprising the CAG promoter operably linked to a codon-optimized nucleotide sequence of SEQ ID NO: 1773 encoding a GBA protein vectorized in AAV2 vector showed significantly higher GCase activity compared to the GBA_VG1 construct comprising a CMVie enhancer and CBA promoter operably linked to the nucleotide sequence of SEQ ID NO: 1781 encoding the GBA protein at the MOI of 10⁴.

[1126] An LC-MS/MS assay was then used to quantify levels of the GBA substrate glycosylsphingosine (GlcSph, ng/mg Lamp1) in the cell lysis from GD II patient-derived fibroblasts transduced with the viral genomes constructs GBA_VG1 (SEQ ID NO: 1759), GBA_VG14 (SEQ ID NO: 1809), GBA_VG15 (SEQ ID NO: 1810), GBA_VG16 (SEQ ID NO: 1811), GBA_VG17 (SEQ ID NO: 1812), GBA_VG18 (SEQ ID NO: 1813), GBA_VG19 (SEQ ID NO: 1814), and GBA_VG20 (SEQ ID NO: 1815) vectorized in an AAV2 vector. As shown in FIG. 4B, all viral genome constructs tested reduced GBA substrate buildup indicating successful target engagement within GD patient cells.

### Example 13: Bioinformatics Analysis of Wild-Type and Codon-Optimized Sequences Encoding a GBA Protein

[1127] Bioinformatics analysis on the sequence level was performed to differentiate between viral genome constructs encoding a GBA protein, wherein the GBA protein is encoded by a wild-type nucleotide sequence of SEQ ID NO: 1777 (e.g., the nucleotide sequence encoding the GBA protein of GBA_VG21, as shown in Table 18), a first codon-optimized nucleotide sequence of SEQ ID NO: 1773 (e.g., the nucleotide sequence encoding the GBA protein of GBA_VG17, as shown in Table 18-20), or a second codon-optimized of SEQ ID NO: 1781 (the nucleotide sequence encoding the GBA protein of GBA_VG1, as shown in Table 18). Briefly, sequence-level differentiation criteria, such as GC content, RNA accessibility, miRNA binding, transcriptional motifs and splicing events, were assessed using mRNA-based sequence analysis tools (RegRNA 2.0 by Chang et al., 2013, BMC Bioinformatics, 14, Suppl 2:S4; miRDB by Chen & Wang, 2020, Nucleic Acids Res, 48(D1): D127-D131; the contents of each herein incorporated by reference in its entirety).

[1128] Based on the above analysis using miRDB (Chen & Wang, 2020, supra) with respect to miRNA binding, a series of putative recognition sites were found in the construct with first codon-optimized nucleotide sequence encoding a GBA protein of SEQ ID NO: 1773 (GBA_VG17). Specifically, this codon-optimized sequence of SEQ ID NO: 1773 had 42 total miRNA binding sites including 4 high confidence hits. Among those, 21 sites were distinct from the second codon optimized sequence of SEQ ID NO: 1781 of GBA_VG1, and 11 sites were new and not present in the wild type nucleotide sequence of SEQ ID NO: 1777 of GBA_VG21. This is summarized in Table 11. A second miRNA analysis tool (RegRNA 2.0 by Chang et al., 2013 supra), as shown in Table 28, further confirmed that miRNA binding sites tended to be unique to each sequence codon optimized sequence analyzed.

TABLE 11
miRDB Summary of miRNA Binding

| | WT (SEQ ID | WT (SEQ ID | SEQ ID | |
|---|---|---|---|---|
| | NO: 1777) | NO: 1777) | NO: 1773 | “High |
| | vs SEQ ID | vs SEQ ID | vs SEQ ID | Confidence” |
| | NO: 1781 | NO: 1773 | NO: 1781 | miRNA |
| SEQ ID NO: 1773 | N/A | 30 | 21 | 4 |
| (GBA_VG17) Unique | | | | |
| Wild Type (SEQ ID NO: | 42 | 41 | N/A | 1 |
| 1777) (GBA_VG21) Unique | | | | |
| SEQ ID NO: 1781 | 27 | N/A | 17 | 2 |
| (GBA_VG1) Unique | | | | |
| Similar | 11 | 12 | 21 | 0 |

TABLE 28
RegRNA 2.0 Summary of miRNA Binding

| | WT (SEQ ID | WT (SEQ ID | SEQ ID |
|---|---|---|---|
| | NO: 1777) | NO: 1777) | NO: 1773 |
| | vs SEQ ID | vs SEQ ID | vs SEQ ID |
| | NO: 1781 | NO: 1773 | NO: 1781 |
| SEQ ID NO: 1781 | 3 | N/A | 3 |
| (GBA_VG1) | | | |
| Unique | | | |
| SEQ ID NO: 1773 | N/A | 2 | 3 |
| (GBA_VG17) | | | |
| Unique | | | |
| WT (SEQ ID NO: | 6 | 6 | N/A |
| 1777) (GBA_VG21) | | | |
| Unique | | | |
| Similar | 0 | 1 | 0 |

[1129] With respect to the analysis of the transcriptional motifs, the first codon-optimized sequence of SEQ ID NO: 1773 in GBA_VG17 had 70 total sites; 32 sites were distinct from the second codon optimized sequence of SEQ ID NO: 1781 in GBA_VG1, and 54 sites were new and not present in the wild type sequence of SEQ ID NO: 1777 in GBA_VG21 (Table 12).

TABLE 12
RegRNA 2.0 summary of regulatory motifs

| | WT (SEQ ID | WT (SEQ ID | SEQ ID |
|---|---|---|---|
| | NO: 1777) | NO: 1777) | NO: 1773 |
| | vs SEQ ID | vs SEQ ID | vs SEQ ID |
| | NO: 1781 | NO: 1773 | NO: 1781 |
| SEQ ID NO: 1781 | 49 | N/A | 24 |
| (GBA_VG1) Unique | | | |
| SEQ ID NO: 1773 | N/A | 54 | 32 |
| (GBA_VG17) Unique | | | |
| Wild Type (SEQ ID | 39 | 34 | N/A |
| NO: 1777) (GBA_VG21) | | | |
| Unique | | | |
| Similar | 11 | 16 | 38 |

[1130] With respect to the splicing events analysis, the first codon-optimized sequence of SEQ ID NO: 1773 in GBA_VG17 had 5 total sites; 3 sites were distinct form the second codon-optimized sequence of SEQ ID NO: 1781 GBA sequence in GBA_VG1, and all 3 of these were completely new and not present in the wild-type sequence of SEQ ID NO: 1777 in GBA_VG21 (Table 13).

TABLE 13
Summary of RegRNA 2.0 Splice Events

| | WT (SEQ ID | WT (SEQ ID | SEQ ID |
|---|---|---|---|
| | NO: 1777) | NO: 1777) | NO: 1773 |
| | vs SEQ ID | vs SEQ ID | vs SEQ ID |
| | NO: 1781 | NO: 1773 | NO: 1781 |
| Wild Type (SEQ ID | 6 | 6 | N/A |
| NO: 1777) (GBA_VG21) | | | |
| Unique | | | |
| SEQ ID NO: 1773 | N/A | 5 | 3 |
| (GBA_VG17) Unique | | | |
| SEQ ID NO: 1781 | 3 | N/A | 2 |
| (GBA_VG1) Unique | | | |
| Similar | 1 | 0 | 2 |

[1131] The GC content of the first codon optimized sequence (SEQ ID NO: 1773) was compared to the second codon optimized sequence (SEQ ID NO: 1781) and the wild-type sequence (SEQ ID NO: 1777). For RNA accessibility and GC content, the wild type GC biodistribution pattern was maintained in the first codon optimized sequence of SEQ ID NO: 1773 of GBA_VG17 (FIG. 5). However, the second codon optimized sequence of SEQ ID NO: 1781 (GBA_VG1) had balanced GC content across the entire length of the nucleotide sequence (FIG. 5).

[1132] The percentage homology for SEQ ID NO: 1781 (GBA_VG1) and SEQ ID NO: 1773 (GBA_VG17) with respect to the wild type sequence (SEQ ID NO: 1777; GBA_VG21) is shown in Table 14. The first codon-optimized sequence of SEQ ID NO: 1773 in GBA_VG17 shares about 80.6% and about 80.0% sequence homology with respect to the wild type sequence of SEQ ID NO: 1777 in GBA_VG21, without and with the signal sequence, respectively. The second codon-optimized sequence (SEQ ID NO: 1781) in GBA_VG1 shares about 81.3% and about 80.7% sequence homology with respect to the wild type GBA sequence, without and with signal sequence, respectively. The first codon-optimized sequence of SEQ ID NO: 1773 in GBA_VG17 has about 87.0% and about 86.3% sequence homology with respect to the second codon optimized nucleotide sequence of SEQ ID NO: 1781, in GBA_VG1 without and with signal sequence, respectively. There were 131 unique mutations introduced into the first codon-optimized nucleotide sequence of SEQ ID NO: 1773 (GBA_VG17) relative to the wild type nucleotide sequence of SEQ ID NO: 1777 (GBA_VG21). The second codon-optimized nucleotide sequence of SEQ ID NO: 1781 (GBA_VG1) had 120 unique mutations relative to the wild type nucleotide sequence of SEQ ID NO: 1777 (GBA_VG21).

TABLE 14
GC Content and Percentage Homology of Codon
Optimized Sequences (SEQ ID NO: 1773 or 1781) Relative
to the Wild Type Sequence (SEQ ID NO: 1777)
% Homology to WT GBA

| | Without | With | Splice | | G/C |
|---|---|---|---|---|---|
| cDNA | signal | Signal | site | Unique | content |
| Source | sequence | sequence | only | Mutations | (WT 55%) |
| SEQ ID NO: | 80.6% | 80.0% | 4 bp | 131 | 59% |
| 1773 | | | muta- | | |
| (GBA_VG17) | | | tion | | |
| SEQ ID NO: | 81.3% | 80.7% | 5 bp | 120 | 58.5% |
| 1781 | | | muta- | | |
| (GBA_VG1) | | | tion | | |
| % SEQ ID | 87.0% | 86.3% | 3 bp | 190 | |
| NO: 1773 to | | | differ- | (similar) | |
| SEQ ID NO: | | | ence | | |
| 1781 | | | | | |
| (GBA_VG17/ | | | | | |
| GBA_VG1) | | | | | |

### Example 14: Functional Comparison of Wild-Type and Codon-Optimized Sequences Encoding a GBA Protein

[1133] GBA expression and GCase activity of a GBA protein was compared for the vectorized viral genome constructs GBA_VG17 (SEQ ID NO: 1812) comprising a first codon optimized sequence (SEQ ID NO: 1773) encoding the GBA protein, GBA_VG1 (SEQ ID NO: 1759) comprising a second codon optimized sequence (SEQ ID NO: 1781) encoding the GBA protein, and GBA_VG21 (SEQ ID NO: 1816) comprising a wild-type GBA sequence (SEQ ID NO: 1777) encoding a GBA protein.

[1134] GD-II patient fibroblasts (GD-II GM00877) were treated at 10⁴⁵ MOI of AAV2 vectors comprising the following constructs: GBA_VG17 (AAV2.GBA_VG17), GBA_VG1 (AAV2.GBA_VG1), or GBA_VG21 (AAV2.GBA_VG21), and GCase activity was quantified as RFU per mL and normalized to mg of total protein. As shown in FIG. 6A, AAV2.GBA_VG17 resulted in superior enzymatic GCase activity compared to AAV2.GBA_VG1 and AAV2.GBA_VG21 treated cells. GCase activity was 52.4 fold higher in AAV2.GBA_VG17 treated GD patient cells compared to a no AAV control; but only 30.8 fold and 32.9 fold higher in AAV2.GBA_VG21 and AAV2.GB_VG1 treated GD patient cells, respectively, compared to a no AAV control.

[1135] GD-II patient fibroblasts (GD-II GM00877) were then treated at an MOI of 10⁶ of AAV2 vectors comprising the following constructs: GBA_VG17 (AAV2.GBA_VG17), GBA_VG1 (AAV2.GBA_VG1), or GBA_VG21 (AAV2.GBA_VG21), and glucosylsphingosine levels (GlcSph in cell lysate (ng/mg Lamp1) and GBA substrate reduction activity was measured by LC-MS/MS. As shown in FIG. 6B, all constructs tested resulted in similar glucosylsphingosine levels and GBA substrate reduction, which were significantly reduced compared to the no AAV control. Expression of the encoded GBA protein by these GD patient cells treated with AAV2.GBA_VG17, AAV2.GBA_VG1, and AAV2.GBA_17 vectors was confirmed by Western blot.

[1136] Taken together, these data demonstrate higher GCase activity, stable GBA protein expression, and significant reduction of glucosylsphingosine levels with AAV2 vectorized GB_VG17 (SEQ ID NO: 1812), comprising the codon-optimized nucleotide sequence of SEQ ID NO: 1773 encoding the GBA protein compared to AAV2 vectorized GBA_VG1 and GBA_VG21.

### Example 15. Route of Administration and Production Platform Comparison Study

[1137] In this Example, HEK and Sf9-produced AAV9 vectors, for biodistribution and GBA expression in wild type rat brain were assessed. The vectors were administered to the animals either by a single route of administration by intra-cisterna magna (ICM) or intra-thalamic (ITH) delivery, or a dual route of administration, comprising a combination of ICM and ITH delivery.

[1138] AAV9 vectors packaged with GBA_VG1 (SEQ ID NO: 1759) (AAV9.GBA_VG1) produced in HEK and SF9 cells were injected into wild-type rat. For bilateral ITH administration, 7.5×10⁹ AAV9.GBA_VG1 viral genomes were injected into the thalamus of each hemisphere, resulting in a total dose of 1.5 10⁹ vector genomes. For ICM injection, 1.5×10¹⁰ AV9.GBA_VG1 viral genomes were injected. For dual ITH and ICM administration, 1.5×10¹⁰ AV9.GBA_VG1 viral genomes were injected for ICM delivery, and 7.5×10⁹ AAV9.GBA_VG1 viral genomes were injected into the thalamus of each hemisphere for bilateral ITH delivery, for a total dose of 3×10¹⁰ AV9.GBA_VG1 viral genomes. Four weeks post-injection, the brains of the rats were assayed for bio-distribution of the viral genome and GCase activity in the central nervous system and peripheral tissues.

[1139] First, all animals throughout all treatment groups continued to gain weight consistently post operatively until time of euthanasia (4 week in life). Daily clinical observations showed normal healthy subjects. Therefore, at both selected doses of 1.5×10¹⁰ for single route of administration, and 3×10¹⁰ for combination route of administration, all animals tolerated the AAV treatments.

[1140] Viral genome distribution was also assessed at 28 days post intrathalamic dosing of HEK and Sf9 produced AAV9-GBA vectors in the wild-type rat brain, particularly in the thalamus, hippocampus striatum, and cortex. In the thalamus, hippocampus and striatum, there was a trend of higher average biodistribution with HEK-produced AAV9 vector compared to Sf9 (˜3-6 fold VG/cell increase). In the cortex, a similar average biodistribution profile was observed for HEK and Sf9 produced AAV9 vectors. These data show increased biodistribution with AAV9-GBA vectors produced by an HEK platform as compared to Sf9 following intrathalamic dosing in rats.

[1141] GCase activity was also compared at 28 days post intrathalamic dosing of HEK and Sf9 produced AAV9-GBA vectors in the wild-type rat brain. GCase activity was generally increased over baseline. However, the average increase in GCase activity was the greatest in the thalamus (site of injection) (70% over endogenous for Sf9 produced vectors and 20% over endogenous for HEK vectors, and in the thalamus, a moderate increase in average GCase activity was observed for HEK produced vectors relative to Sf9 produced vectors. Low to moderate increase was observed in forebrain and midbrain regions (cortex, striatum and hippocampus, ˜5-40% over endogenous).

[1142] Taken together, these data demonstrate that bilateral ITH AAV9.GBA_VG1 dosing resulted in successful distribution of AAV VGs in the CNS tissues and detectable overexpression of GBA (increased GCase activity over endogenous GCase activity) within a wild-type rat brain.

[1143] The effects of routes of administration on viral genome distribution and GCase activity of HEK produced AAV9.GBA_VG1 vectors were evaluated at day 28 post ICM, ITH, or dual ICM and ICM delivery of the vectors. A significantly higher viral genome distribution in ITH group was observed in deep-brain structures, including the thalamus and hippocampus, compared to ICM or dual ITH and ICM dosing. Similarly, higher viral genome distribution was observed in ITH group compared to ICM and dual ITH and ICM dosing. For cortex tissue, dual ITH and ICM dosing resulted in a significantly higher viral genome biodistribution compared to ITH and ICM dosing. Taken together, ITH delivery of AAV9-GBA vector displayed a higher viral genome (VG) biodistribution profile in the deep-midbrain structures (especially in the hippocampus and thalamus) as compared to ICM and dual ITH+ICM delivery. Further, ITH delivery appeared to drive the VG biodistribution profile in fore/mid brain observed with dual ITH+ICM injection.

[1144] For hindbrain tissues, a significantly higher cerebellar viral genome distribution was observed in ITH group compared to ICM or dual ITH and ICM dosing. Similarly, a trend of higher viral genome biodistribution was observed in brainstem for ITH group compared to ICM and dual ITH and ICM dosing. Therefore, similar to forebrain and midbrain structures, ITH delivery of AAV9-GBA_VG1 vector produced by HEK cells displayed a higher viral genome biodistribution profile in the hindbrain structure as compared to ICM and dual ITH and ICM delivery.

[1145] For forebrain and midbrain tissues with respect to GCase activity, the highest increase was observed at site of injection in thalamus (about 250% post ITH deliver followed by about 207% in dual ITH and ICM dosing). Moderate increase was observed post ITH delivery in cortex (about 123% compared to vehicle control, and about 141% after dual ITH and ICM dosing). For ICM dosing, minimal or no increase in GCase activity was observed in thalamus (about 110%) and cortex (about 91%) post ICM delivery. Combinatorial dosing (ICM and ITH) showed the highest GCase activity in cortex (about 141%). Overall, based on the viral genome distribution results and the GCase results, ITH dosing appears to be driving the increase in GCase activity in thalamus and cortex. Additionally, the AAV genome per cell biodistribution shows similar trend of GCase activity in the thalamus and cortex.

[1146] For hindbrain tissues, the highest increase was observed post ITH injection in cerebellum (about 178%), and a low increase was seen post both ICM and dual ICM and ITH delivery in cerebellum. Combinatorial dosing group did not show a higher increase in GCase activity readout within cerebellum. Overall, based on the viral genome distribution results and the GCase results, ITH dosing appears to be driving the increase in GCase activity in the cerebellum and the AAV genome per cell biodistribution shows similar trend of GCase activity in the cerebellum.

[1147] GCase activity was also evaluated in CSF fluid. Different levels of increase in CSF GCase activity were observed with different routes of administration. Specifically, the highest increase in GCase activity was observed in combinatorial dosing (ITH and ICM), followed by ITH delivery, and only moderate increase was observed by ICM delivery. These data demonstrated that AAV delivered GBA gene transfer in rats resulted in secretion of active GCase product in CSF.

[1148] This experiment demonstrated that intrathalamic injection and dual mode injection resulted in a more efficient delivery of AAV-GBA viral particles and a higher GCase expression/activity in the CNS tissues and the CSF.

### Example 16: In Vivo Evaluation of a Vectorized Viral Genome Comprising a Codon Optimized Nucleotide Sequence Encoding GBA

[1149] This Example investigates the distribution and efficacy of the viral genome construct GB_VG17 (SEQ ID NO: 1812) comprising a codon-optimized nucleotide sequence (SEQ ID NO: 1773) encoding a GBA protein, vectorized in a VOY101 capsid (VOY101.GBA_VG17) in wild-type C57BL/6 mice. VOY101 is a capsid protein that enables blood brain barrier penetration after IV injection.

[1150] Mice were intravenously injected with 2e13 VG/kg of VOY101.GBA_VG17 or a vehicle control, into the lateral tail vein. At 28-days post IV injection, various CNS tissues (e.g., cortex, striatum, hippocampus, thalamus, cerebellum, brainstem, and/or spinal cord) and peripheral tissues (e.g., heart, liver, and/or spleen) were harvested to measure viral genome (VG) biodistribution (VG/cell), GCase activity, and GBA mRNA expression (transgene specific and endogenous). All animals treated remained healthy and there was no significant difference in the body weight between mice treated with VOY101.GBA_VG17 and mice treated with the vehicle control.

[1151] With respect to VG biodistribution, high levels (approximately >50 vg/cell) of VOY101.GBA_VG17 distribution was observed across the forebrain and midbrain. In the cortex, 81.31 VG/cell were quantified on average (range: ˜75-85 vg/cell); in the striatum, 150.39 VG/cell were quantified on average (range: ˜90-330 vg/cell); in the hippocampus, 152.91 VG/cell were quantified on average (range: ˜70-195 vg/cell); and in the thalamus, 117.94 VG/cell were quantified on average (range: ˜70-190 vg/cell). Therefore, successful VOY101.GBA_VG17 gene transfer was achieved across the forebrain and midbrain regions.

[1152] Similarly, high levels (approximately >50 vg/cell) of VOY101.GBA_VG17 distribution was observed across the hind brain and spinal cord (cervical region). In the cerebellum, 65.77 VG/cell were quantified on average (range: ˜23-105 vg/cell); in the brainstem, 159.22 VG/cell were quantified on average (range: ˜110-305 vg/cell); and in the spinal cord, 176.29 VG/cell were quantified on average (range: ˜95-280 vg/cell). Therefore, successful VOY101.GBA_VG17 gene transfer was also achieved across the hindbrain and spinal cord.

[1153] With respect to VG biodistribution in peripheral tissues, detectable levels of VOY101.GBA_VG17 were observed in the heart, spleen, and liver, but this was approximately 4-10 fold lower than the levels observed in the CNS tissues. In the heart, 11.58 VG/cell were quantified on average (range: ˜5-21 vg/cell); in the spleen, 29.99 VG/cell were quantified on average (range: ˜7-82 vg/cell); and in the liver, 18.76 VG/cell were quantified on average (range: ˜5-60 vg/cell).

[1154] With respect to GCase activity (measured as RFU/mL normalized to mg of protein), the forebrain and midbrain following IV injection of VOY101.GBA_VG17 demonstrated a significant increase in GCase activity over baseline (vehicle control). The highest increase was observed in the cortex (4.86 fold higher than the vehicle control). A similar increase was observed in the striatum (4.6 fold higher than the vehicle control) and the thalamus (4.74 fold higher than the vehicle control). Therefore, a significant increase in GCase activity was observed in the forebrain and midbrain which had high VOY101.GBA_VG17 biodistribution. Similarly, the hindbrain structures following IV injection of VOY101.GBA_VG17 demonstrated a significant increase in GCase activity over baseline (vehicle control). The cerebellum showed a 4.04 fold higher GCase activity than the vehicle control and the brainstem showed a 5.26 fold higher GCase activity than the vehicle control. Therefore, a significant increase in GCase activity was also observed in the hind brain which had high VOY101.GBA_VG17 biodistribution. Overall, all brain regions tested showed a 4-5 fold increase in GCase activity relative to the vehicle control and IV delivery of VOY101.GBA_VG17 resulted in a successful and uniform increase in GCase activity across pertinent CNS tissues.

[1155] GCase activity was also measured in the liver (as RFU/mL normalized to mg of protein) following IV injection of VOY101.GBA_VG17. The liver showed a 4.12 fold increase in GCase activity relative to the vehicle control, demonstrating a successful increase in GBA activity in a non-CNS tissue.

[1156] In additional to the cellular and tissue GCase activity levels quantified in both the CNS and the liver, GCase activity was also measured in the fluid of the mice, including in the cerebral spinal fluid (CSF) and the serum, post-IV injection of VOY101.GBA_VG17. GCase activity was higher in the serum as compared to the CSF. A 5.9 fold increase in GCase activity relative to the vehicle treated control was observed in the CSF and a 22.3 fold increase in GCase activity relative to the vehicle treated control was observed in the serum. These data demonstrate active GCase is secreted into extracellular compartments following IV injection of VOY101.GBA_VG17.

[1157] The GCase activity levels quantified and the fold increase in activity relative to the vehicle in the CNS and peripheral tissues and fluid measured following IV injection of VOY101.GBA_VG17 are summarized in Table 27.

TABLE 27
Summary of GCase activity levels (RFU/per
mL) normalized to mg of protein

| GCase Activity (RFU/per mL) | Fold Increase in GCase activity |
|---|---|
| normalized to mg of protein | relative to no vehicle control |

| | | |
|---|---|---|
| Cortex | Vehicle | 4.86 |
| 62246 | 12789 | |
| Striatum | Vehicle | 4.64 |
| 32063 | 6898 | |
| Thalamus | Vehicle | 4.74 |
| 40506 | 9061 | |
| Cerebellum | Vehicle | 4.04 |
| 36082 | 8926 | |
| Brainstem | Vehicle | 5.26 |
| 44706 | 8495 | |
| Liver | Vehicle | 4.1 |
| 100123 | 24272 | |
| CSF | Vehicle | 5.9 |
| 3707 | 627 | |
| Serum | Vehicle | 22.3 |
| 6919 | 310 | |

[1158] Both endogenous and transgene specific GBA mRNA (payload) expression was quantified post-IV injection of VOY101.GBA_VG17 in the cortex, thalamus, and brainstem. GBA mRNA was quantified as GBA mRNA expression per 1,000 transcripts normalized to geomean (GAPDH, HPRT1, PPIA). With respect to endogenous GBA mRNA, approximately 38-63 copies per 1000 transcripts were measured across the brain. More specifically, in the cortex, thalamus, and brainstem, 63.10 endogenous GBA mRNA/1,000 transcripts, 38.81 endogenous GBA mRNA/1,000 transcripts, and 38.95 endogenous GBA mRNA/1,000 transcripts were quantified, respectively. With respect transgene specific GBA mRNA, approximately 1314-1765 copies per 1000 transcripts were measured across the brain. In the cortex, thalamus, and brainstem, 1314.39 transgene specific GBA mRNA/1,000 transcripts, 1547.21 transgene specific GBA mRNA/1,000 transcripts, and 1764.02 transgene specific GBA mRNA/1,000 transcripts were quantified, respectively. Accordingly, in the cortex, thalamus, and brain stem, there was an 874 fold, 1032 fold, and 1244 fold increase in transcript specific GBA mRNA compared to the vehicle control, respectively. Therefore, successful transcription of the transgene comprising the codon-optimized nucleotide sequence (SEQ ID NO: 1773) encoding the GBA protein was achieved in the brain at 28-days post IV injection of a blood brain barrier penetrant VOY101.GBA_VG17 vector. Endogenous GBA mRNA levels in the brain maintained similar levels in the tissues treated with VOY101. GBA_VG17 and the tissues treated with the vehicle control. These data demonstrate successful transgene transcription and expression of a GBA payload in the CNS following IV injection of VOY101.GBA_VG17.

[1159] Both endogenous and transgene specific GBA mRNA expression was also quantified post-IV injection of VOY101.GBA_VG17 in the liver. In the liver, 182.29 endogenous GBA mRNA/1,000 transcripts were quantified (range: ˜188-240 per 1000 transcripts), and there was no significant difference in the endogenous GBA mRNA levels between treated and untreated mice. Approximately, 1372.45 transgene specific GBA mRNA/1,000 transcripts were quantified in the liver, and a 739 fold increase in GBA mRNA was observed in the treated mice compared to the vehicle control. These data demonstrate successful transgene transcription and expression of a GBA payload in the liver following IV injection of VOY101.GBA_VG17.

[1160] The relationship between biodistribution (VG/cell) and GCase activity (RFU/mL, fold over endogenous GCase activity, normalized to mg of protein) following IV injection of VOY101.GBA_VG17 was also evaluated in the cortex, striatum, thalamus, brainstem, cerebellum, and liver of the mice. In the CNS tissues, approximately a 300-660% fold increase in GCase activity over endogenous GCase activity was observed (FIG. 8) and 595-1825 transgene-specific GBA mRNA copies/1000 transcripts were quantified. In the liver, while there was intra-group variability, a 180-850% fold increase in GCase activity relative to endogenous GCase activity was measured, with approximately 330-2450 transgene specific GBA mRNA copies per 1000 transcripts quantified. The GCase levels quantified in the liver were comparable to the CNS tissues at lower VG/cell levels (FIG. 8). It is predicted that a 30-50% fold increase in GCase activity over endogenous is clinically impactful. Therefore, intravenous injection of VOY101.GBA_VG17 was able to increase the levels of GCase activity in various CNS and peripheral tissues relative to endogenous, well above the predicted fold increase thought to be clinically impactful.

[1161] Some of these data discussed above are summarized in Table 22 below. In summary, VOY101.GBA_VG17 which comprises the codon-optimized nucleotide sequence of SEQ ID NO: 1773 encoding the GBA protein demonstrated high biodistribution in the CNS, increased GCase activity in the CNS and peripheral tissues and fluid, and successful transgene transcription and expression. GBA_VG17 could therefore be used in the treatment of disorders associated with a lack of a GBA protein and/or GCase activity, such as neuronopathic (affects the CNS) and non-neuronopathic (affects non-CNS) Gaucher's disease, PD associated with a mutation in the GBA gene, and dementia with Lewy Bodies.

TABLE 22
Summary of VG biodistribution, GCase activity, and GBA mRNA
data 28 day post IV injection of VOY101.GBA_VG17 at
2e13 vg/kg in the cortex, thalamus, brain stem and liver

| | | | | GCase |
|---|---|---|---|---|
| | | GBA mRNA | GBA mRNA | expression |
| | VG/ | (over endogenous | (over vehicle | (over vehicle |
| Region | Cell | GBA) | baseline) | baseline) |
| Cortex | 83.31 | 20.83 | 874 | 4.86 |
| Thalamus | 117.94 | 39.87 | 1032 | 4.74 |
| Brain Stem | 159.22 | 45.29 | 1244 | 5.26 |
| Liver | 18.76 | 7.29 | 739 | 4.12 |

### Example 17. De-targeting GBA Expression in the Dorsal Root Ganglia (DRG)

[1162] This Example demonstrates the use of a miR183 binding site to reduce GBA expression in the dorsal root ganglion (DRG) neurons, which express the corresponding endogenous microRNA, miR183.

[1163] A viral genome construct, GBA_VG33 (SEQ ID NO: 1828, described in Tables 18-19 and 21), comprising a codon-optimized nucleotide sequence (SEQ ID NO: 1773) encoding a GBA protein and a miR183 binding site series (SEQ ID NO: 1849), comprising four miR183 binding sites (each comprising SEQ ID NO: 1847), each separated by an 8 nucleotide spacer (SEQ ID NO: 1848). The GBA_VG33 were also vectorized into an AAV2 vector (AAV2.GBA_VG33).

[1164] HEK293 cells were transfected with the GBA_VG33 construct and GBA protein expression was compared to cells transfected with the GB_VG17 control construct (SEQ ID NO: 1812) which comprises a codon-optimized nucleotide sequence (SEQ ID NO: 1773) encoding a GBA protein but does not comprise a miR183 binding site series. Similar GBA protein expression levels were observed following transfection with the GBA_VG33 construct and the GBA_VG17 control construct. HEK293 cells were also co-transfected with either the GBA_VG33 construct comprising the miR183 binding site series, or the GBA_VG17 control construct, and miR183, and GBA protein expression was measured. A significant reduction of GBA expression was observed in HEK293 cells co-transfected the GBA_VG33 construct and miR183 compared to those cells co-transfected with the GBA_VG17 control and miR183. These data demonstrated that the GBA_VG33 construct comprising the miR183 binding site series was able to reduce GBA expression in the presence of the corresponding microRNA (miR183).

[1165] De-targeting of GBA expression in the DRG was also investigated in rat embryonic DRG neurons. The rat embryonic DRG neurons were transduced with AAV2.GBA_VG33 (comprises the miR183 binding site series) or AAV2.GBA_VG17 control at an MOI of 10³⁵ or 10⁴⁵, or a no AAV control. GCase activity was measured as RFU/mL per mg of total protein. As shown in FIG. 7, GCase activity was significantly reduced in the rat embryonic DRG neurons transduced with AAV2.GBA_VG33 compared to those transfected with AAV2.GBA_VG17, at both MOIs tested. Also, the levels of GCase activity measured in the rat embryonic DRG neurons transduced with AAV2.GBA_VG33 at both MOIs was similar to the level of GCase measured in the no AAV control.

[1166] Taken together, these data demonstrate that successful GBA expression de-targeting in the DRG was achieved with the GBA_VG33 (SEQ ID NO: 1828), comprising a codon-optimized nucleotide sequence (SEQ ID NO: 1773) encoding the GBA protein and the miR183 binding site series (SEQ ID NO: 1849).

### IX. Equivalents and Scope

[1167] Those skilled in the art will recognize, or be able to ascertain using no more than routine experimentation, many equivalents to the specific embodiments in accordance with the Detailed Description provided herein. The scope of the present disclosure is not intended to be limited to the above Detailed Description, but rather is as set forth in the appended claims.

[1168] In the claims, articles such as “a,” “an,” and “the” may mean one or more than one unless indicated to the contrary or otherwise evident from the context. Claims or descriptions that include “or” between one or more members of a group are considered satisfied if one, more than one, or all of the group members are present in, employed in, or otherwise relevant to a given product or process unless indicated to the contrary or otherwise evident from the context. The disclosure includes embodiments in which exactly one member of the group is present in, employed in, or otherwise relevant to a given product or process. The disclosure includes embodiments in which more than one, or the entire group members are present in, employed in, or otherwise relevant to a given product or process.

[1169] It is also noted that the term “comprising” is intended to be open and permits but does not require the inclusion of additional elements or steps. When the term “comprising” is used herein, the term “consisting of” is thus also encompassed and disclosed.

[1170] Where ranges are given, endpoints are included. Furthermore, it is to be understood that unless otherwise indicated or otherwise evident from the context and understanding of one of ordinary skill in the art, values that are expressed as ranges can assume any specific value or subrange within the stated ranges in different embodiments of the disclosure, to the tenth of the unit of the lower limit of the range, unless the context clearly dictates otherwise.

[1171] In addition, it is to be understood that any particular embodiment of the present disclosure that falls within the prior art may be explicitly excluded from any one or more of the claims. Since such embodiments are deemed to be known to one of ordinary skill in the art, they may be excluded even if the exclusion is not set forth explicitly herein. Any particular embodiment of the compositions of the disclosure (e.g., any, composition, therapeutic or active ingredient; any method of production; any method of use; etc.) can be excluded from any one or more claims, for any reason, whether or not related to the existence of prior art.

[1172] It is to be understood that the words which have been used are words of description rather than limitation, and that changes may be made within the purview of the appended claims without departing from the true scope and spirit of the disclosure in its broader aspects.

[1173] While the present disclosure has been described at some length and with some particularity with respect to the several described embodiments, it is not intended that it should be limited to any such particulars or embodiments or any particular embodiment, but it is to be construed with references to the appended claims so as to provide the broadest possible interpretation of such claims in view of the prior art and, therefore, to effectively encompass the intended scope of the disclosure.

[1174] All publications, patent applications, patents, and other references mentioned herein are incorporated by reference in their entirety. In case of conflict, the present specification, including definitions, will control. In addition, section headings, the materials, methods, and examples are illustrative only and not intended to be limiting.

What is claimed is:

1. An isolated, e.g., recombinant, nucleic acid comprising a transgene encoding a β-glucocerebrosidase (GBA) protein, wherein the nucleotide sequence encoding the GBA protein comprises a nucleotide sequence at least 90% identical to the nucleotide sequence of SEQ ID NO: 1773.

2. The isolated nucleic acid of claim 1, wherein the nucleotide sequence encoding the GBA protein comprises the nucleotide sequence of SEQ ID NO: 1773, or a nucleotide sequence at least 95% identical to SEQ ID NO: 1773.

3. The isolated nucleic acid of claim 1 or 2, which further comprises a nucleotide sequence encoding a miR binding site that reduces expression of the GBA protein encoded by the nucleic acid in a cell or tissue where the corresponding miRNA is expressed, optionally wherein the encoded miRNA binding site is complementary, e.g., fully complementary or partially complementary, to a miRNA expressed in a cell or tissue of the DRG, liver, hematopoietic, or a combination thereof.

4. An isolated, e.g., recombinant viral genome comprising a nucleic acid comprising a transgene encoding a GBA protein, and further comprising a nucleotide sequence encoding a miR binding site that modulates, e.g., reduces, expression of the encoded GBA protein in a cell or tissue of the DRG, liver, hematopoietic lineage, or a combination thereof.

5. The isolated nucleic acid of claim 3, or the viral genome of claim 4, wherein the encoded miR binding site comprises a miR183 binding site, a miR122 binding site, a miR-142-3p, or a combination thereof, optionally wherein:
(i) the encoded miR183 binding site comprises the nucleotide sequence of SEQ ID NO: 1847, or a nucleotide sequence having at least 85%, 90%, 92%, 95%, 97%, 98%, or 99% sequence identity thereto; or a nucleotide sequence having at least one, two, three, four, five, six, or seven modifications, but no more than ten modifications of SEQ ID NO: 1847;
(ii) the encoded miR122 binding site comprises the nucleotide sequence of SEQ ID NO: 1865, or a nucleotide sequence having at least 85%, 90%, 92%, 95%, 97%, 98%, or 99% sequence identity thereto; or a nucleotide sequence having at least one, two, three, four, five, six, or seven modifications, but no more than ten modifications of SEQ ID NO: 1865; and/or
(iii) the encoded miR-142-3p binding site comprises the nucleotide sequence of SEQ ID NO: 1869, or a nucleotide sequence having at least 70%, 75%, 80%, 85%, 90%, 92%, 95%, 97%, 98%, or 99% sequence identity thereto; or a nucleotide sequence having at least one, two, three, four, five, six, or seven modifications, but no more than ten modifications of SEQ ID NO: 1869.

6. The isolated nucleic acid of any one of claims 1-3, or the viral genome of claim 4 or 5, wherein the nucleic acid further encodes an enhancement element, wherein the encoded enhancement element comprises one, two, or all of:
(a) a prosaposin polypeptide, Saposin C polypeptide, or functional fragment or variant thereof, optionally comprising the amino acid sequence of SEQ ID NOs: 1789, 1758, 1750, 1752, 1754, 1756-1758, 1784, or 1785, an amino acid sequence having at least one, two, or three but no more than four modifications, e.g., substitutions (e.g., conservative substitutions), relative to SEQ ID NOs: 1789, 1758, 1750, 1752, 1754, 1756-1758, 1784, or 1785; or an amino acid sequence at least 85% identical thereto;
(b) a cell penetrating peptide, optionally comprising the amino acid sequence of any of SEQ ID NOs: 1794, 1796, or 1798, or an amino acid sequence having at least one, two, or three but no more than four modifications, e.g., substitutions (e.g., conservative substitutions), relative to SEQ ID NOs: 1794, 1796, or 1798; or
(c) a lysosomal targeting sequence, optionally comprising the amino acid sequence of any of SEQ ID NOs: 1800, 1802, 1804, 1806, or 1808, or an amino acid sequence having at least one, two, or three but no more than four modifications, e.g., substitutions (e.g., conservative substitutions), relative to SEQ ID NOs: 1800, 1802, 1804, 1806, or 1808.

7. An isolated, e.g., recombinant, nucleic acid comprising a transgene encoding a GBA protein and an enhancement element, wherein the encoded enhancement element comprises one, two, or all of:
(a) a Saposin C polypeptide or functional fragment or variant thereof, optionally comprising the amino acid sequence of SEQ ID NO: 1789 or 1758, or an amino acid sequence at least 85% identical thereto;
(b) a cell penetrating peptide, optionally comprising the amino acid sequence of any of SEQ ID NOs: 1794, 1796, or 1798, or an amino acid sequence having at least one, two, or three but no more than four modifications, e.g., substitutions (e.g., conservative substitutions), relative to SEQ ID NOs: 1794, 1796, or 1798; or
(c) a lysosomal targeting sequence, optionally comprising the amino acid sequence of any of SEQ ID NOs: 1800, 1802, 1804, 1806, or 1808, or an amino acid sequence having at least one, two, or three but no more than four modifications, e.g., substitutions (e.g., conservative substitutions), relative to SEQ ID NOs: 1800, 1802, 1804, 1806, or 1808.

8. The isolated nucleic acid of claim 6 or 7, or the viral genome of claim 6, wherein:
(i) the encoded enhancement element comprises the amino acid sequence of SEQ ID NO: 1789, or an amino acid sequence having at least one, two, or three but no more than four modifications, e.g., substitutions (e.g., conservative substitutions), relative to SEQ ID NO: 1789;
(ii) the nucleotide sequence encoding the enhancement element comprises the nucleotide sequence of 1787, or a nucleotide sequence or a nucleotide sequence at least 85% identical thereto;
(ii) the encoded enhancement element comprises the amino acid sequence of 1802, or an amino acid sequence having at least one, two, or three but no more than four modifications, e.g., substitutions (e.g., conservative substitutions), relative to SEQ ID NO: 1802;
(iii) the nucleotide sequence encoding the enhancement element comprises the nucleotide sequence of 1801, or a nucleotide sequence having at least one, two, or three but no more than four modifications, e.g., substitutions (e.g., conservative substitutions), relative to SEQ ID NO: 1801;
(iv) the encoded enhancement element comprises the amino acid sequence of 1794, or an amino acid sequence having at least one, two, or three but no more than four modifications, e.g., substitutions (e.g., conservative substitutions), relative to SEQ ID NO: 1794; or
(v) the nucleotide sequence encoding the enhancement element comprises the nucleotide sequence of 1793, or a nucleotide sequence having at least one, two, or three but no more than four modifications, e.g., substitutions (e.g., conservative substitutions), relative to SEQ ID NO: 1793.

9. The isolated nucleic acid of claim 7 or 8, or the viral genome of any one of claim 4-6 or 8, wherein the nucleotide sequence encoding the GBA protein comprises the nucleotide sequence of any one of SEQ ID NOs: 1773, 1777, or 1781, or a nucleotide sequence at least 90% (e.g., at least 92%, 95%, 97%, 98%, or 99%) identical thereto.

10. The isolated nucleic acid of any one of claims 6-9, or the viral genome of any one of claim 6 or 8-9, wherein the encoded enhancement element and the encoded GBA protein are connected directly (e.g., without a linker) or are connected via an encoded linker.

11. The isolated nucleic acid or the viral genome of claim 10, wherein:
(i) the encoded linker comprises the amino acid sequence of any of SEQ ID NOs: 1854, 1855, 1843, 1845, or an amino acid sequence having at least one, two, or three but no more than four modifications, e.g., substitutions (e.g., conservative substitutions), relative to SEQ ID NOs: 1854, 1855, 1843, 1845;
(ii) the nucleotide sequence encoding the linker comprises any of the nucleotide sequences of Table 2, or a nucleotide sequence having at least one, two, or three but no more than four modifications, e.g., substitutions (e.g., conservative substitutions), relative to the sequences of Table 2;
(iii) the nucleotide sequence encoding the linker comprises the nucleotide sequence of any one of SEQ ID NOs: 1724, 1726, 1729, or 1730, or a nucleotide sequence having at least one, two, or three but no more than four modifications, e.g., substitutions (e.g., conservative substitutions), relative to SEQ ID NOs: 1724, 1726, 1729, or 1730;
(iv) the encoded linker comprises a furin cleavage site;
(v) the encoded linker comprises a T2A polypeptide;
(vi) the encoded linker comprises a (Gly4Ser)n linker, wherein n is 1-10, e.g., n is 3, 4, or 5; and/or
(vii) the encoded linker comprises a (Gly4Ser)3 linker.

12. The isolated nucleic acid of any one of claims 6-11, or the viral genome of any one of claim 6 or 8-11, wherein:
(i) the nucleotide sequence encoding the enhancement element is located 5′ relative to the nucleotide sequence encoding the GBA protein; and/or
(ii) the nucleotide sequence encoding the enhancement element is located 3′ relative to the nucleotide sequence encoding the GBA protein.

13. The isolated nucleic acid of any one of claim 1-3 or 5-12, or the viral genome of any one of claim 4-6 or 8-12, further encoding a signal sequence, optionally wherein:
(i) the encoded signal sequence comprises the amino acid sequence of SEQ ID NO: 1853 or 1857, or an amino acid sequence at least 85% identical thereto; and/or
(ii) the nucleotide sequence encoding the signal sequence is located 5′ relative to the nucleotide sequence encoding the GBA protein; and/or 5′ relative to the encoded enhancement element.

14. The isolated nucleic acid of any one of claim 1-3 or 5-13, or the viral genome of any one of claim 4-6 or 8-13, wherein:
(i) the nucleic acid comprises in 5′ to 3′ order: a nucleotide sequence encoding a signal sequence comprising the nucleotide sequence of SEQ ID NO: 1850, or a nucleotide sequence at least 85% identical thereto; and a nucleotide sequence encoding a GBA protein comprising the nucleotide sequence of SEQ ID NO: 1773, or a nucleotide sequence at least 85% identical thereto; or
(ii) the nucleic acid encodes in 5′ to 3′ order: a signal sequence comprising the amino acid sequence of SEQ ID NO: 1853, or an amino acid sequence at least 85% identical thereto; and a GBA protein comprising the amino acid sequence of SEQ ID NO: 1775, or an amino acid sequence at least 85% identical thereto.

15. The isolated nucleic acid of any one of claims 7-13, or the viral genome of any one of claim 4-6 or 8-13, wherein the nucleic acid encodes in 5′ to 3′ order:
(i) a signal sequence comprising the amino acid sequence of SEQ ID NO: 1853, or an amino acid sequence at least 85% identical thereto; a GBA protein comprising the amino acid sequence of SEQ ID NO: 1775, or an amino acid sequence at least 85% identical thereto; and an enhancement element comprising the amino acid sequence of SEQ ID NO: 1800, or an amino acid sequence having at least one, two, or three but no more than four modifications, e.g., substitutions, relative to SEQ ID NO: 1800;
(ii) a signal sequence comprising the amino acid sequence of SEQ ID NO: 1853, or an amino acid sequence at least 85% identical thereto; an enhancement element comprising the amino acid sequence of SEQ ID NO: 1802, or an amino acid sequence at least 85% identical thereto; and a GBA protein comprising the amino acid sequence of SEQ ID NO: 1775, or an amino acid sequence at least 85% identical thereto;
(iii) a signal sequence comprising the amino acid sequence of SEQ ID NO: 1853, or an amino acid sequence at least 85% identical thereto; a GBA protein comprising the amino acid sequence of SEQ ID NO: 1775, or an amino acid sequence at least 85% identical thereto; and an enhancement element comprising the amino acid sequence of SEQ ID NO: 1804, or an amino acid sequence having at least one, two, or three but no more than four modifications, e.g., substitutions, relative to SEQ ID NO: 1804;
(iv) a signal sequence comprising the amino acid sequence of SEQ ID NO: 1853, or an amino acid sequence at least 85% identical thereto; a GBA protein comprising the amino acid sequence of SEQ ID NO: 1775, or an amino acid sequence at least 85% identical thereto; and an enhancement element comprising the amino acid sequence of SEQ ID NO: 1806, or an amino acid sequence having at least one, two, or three but no more than four modifications, e.g., substitutions, relative to SEQ ID NO: 1806;
(v) a signal sequence comprising the amino acid sequence of SEQ ID NO: 1853, or an amino acid sequence at least 85% identical thereto; a GBA protein comprising the amino acid sequence of SEQ ID NO: 1775, or an amino acid sequence at least 85% identical thereto; a linker comprising the amino acid sequence of SEQ ID NO: 1845, or an amino acid sequence having at least one, two, or three but no more than four modifications, e.g., substitutions, relative to SEQ ID NO: 1845; and an enhancement element comprising the amino acid sequence of SEQ ID NO: 1798, or an amino acid sequence having at least one, two, or three but no more than four modifications, e.g., substitutions, relative to SEQ ID NO: 1798;
(vi) a signal sequence comprising the amino acid sequence of SEQ ID NO: 1853, or an amino acid sequence at least 85% identical thereto; a GBA protein comprising the amino acid sequence of SEQ ID NO: 1775, or an amino acid sequence at least 85% identical thereto; a linker comprising the amino acid sequence of SEQ ID NO: 1845, or an amino acid sequence having at least one, two, or three but no more than four modifications, e.g., substitutions, relative to SEQ ID NO: 1845; and an enhancement element comprising the amino acid sequence of SEQ ID NO: 1794, or an amino acid sequence having at least one, two, or three but no more than four modifications, e.g., substitutions, relative to SEQ ID NO: 1794;
(vii) a first signal sequence comprising the amino acid sequence of SEQ ID NO: 1853, or an amino acid sequence at least 85% identical thereto; a GBA protein comprising the amino acid sequence of SEQ ID NO: 1775, or an amino acid sequence at least 85% identical thereto; a furin cleavage site comprising the amino acid sequence of SEQ ID NO: 1854, or an amino acid sequence having at least one, two, or three but no more than four modifications, e.g., substitutions, relative to SEQ ID NO: 1854; a T2A polypeptide comprising the amino acid sequence of SEQ ID NO: 1855, or an amino acid sequence having at least one, two, or three but no more than four modifications, e.g., substitutions, relative to SEQ ID NO: 1855; a second signal sequence comprising the nucleotide sequence of SEQ ID NO: 1857, or an amino acid sequence having at least one, two, or three but no more than four modifications, e.g., substitutions, relative to SEQ ID NO: 1857; and an enhancement element comprising the amino acid sequence of SEQ ID NO: 1785, or an amino acid sequence at least 85% identical thereto;
(viii) a first signal sequence comprising the amino acid sequence of SEQ ID NO: 1853, or an amino acid sequence at least 85% identical thereto; a GBA protein comprising the amino acid sequence of SEQ ID NO: 1775, or an amino acid sequence at least 85% identical thereto; a furin cleavage site comprising the amino acid sequence of SEQ ID NO: 1854, or an amino acid sequence having at least one, two, or three but no more than four modifications, e.g., substitutions, relative to SEQ ID NO: 1854; a T2A polypeptide comprising the amino acid sequence of SEQ ID NO: 1855, or an amino acid sequence having at least one, two, or three but no more than four modifications, e.g., substitutions, relative to SEQ ID NO: 1855; a second signal sequence comprising the nucleotide sequence of SEQ ID NO: 1857, or an amino acid sequence having at least one, two, or three but no more than four modifications, e.g., substitutions, relative to SEQ ID NO: 1857; and an enhancement element comprising the amino acid sequence of SEQ ID NO: 1789, or an amino acid sequence at least 85% identical thereto;
(ix) a first signal sequence comprising the amino acid sequence of SEQ ID NO: 1853, or an amino acid sequence at least 85% identical thereto; a GBA protein comprising the amino acid sequence of SEQ ID NO: 1775, or an amino acid sequence at least 85% identical thereto; a furin cleavage site comprising the amino acid sequence of SEQ ID NO: 1854, or an amino acid sequence having at least one, two, or three but no more than four modifications, e.g., substitutions, relative to SEQ ID NO: 1854; a T2A polypeptide comprising the amino acid sequence of SEQ ID NO: 1855, or an amino acid sequence having at least one, two, or three but no more than four modifications, e.g., substitutions, relative to SEQ ID NO: 1855; a second signal sequence comprising the nucleotide sequence of SEQ ID NO: 1857, or an amino acid sequence having at least one, two, or three but no more than four modifications, e.g., substitutions, relative to SEQ ID NO: 1857; and an enhancement element comprising the amino acid sequence of SEQ ID NO: 1758, or an amino acid sequence at least 85% identical thereto;
(x) a signal sequence comprising the amino acid sequence of SEQ ID NO: 1853, or an amino acid sequence at least 85% identical thereto; a GBA protein comprising the amino acid sequence of SEQ ID NO: 1775, or an amino acid sequence at least 85% identical thereto; a linker comprising the amino acid sequence of SEQ ID NO: 1845, or an amino acid sequence having at least one, two, or three but no more than four modifications, e.g., substitutions, relative to SEQ ID NO: 1845; and an enhancement element comprising the amino acid sequence of SEQ ID NO: 1796, or an amino acid sequence at least 85% identical thereto;
(xi) a signal sequence comprising the amino acid sequence of SEQ ID NO: 1853, or an amino acid sequence at least 85% identical thereto; an enhancement element comprising the amino acid sequence of SEQ ID NO: 1794, or an amino acid sequence having at least one, two, or three but no more than four modifications, e.g., substitutions, relative to SEQ ID NO: 1794; a linker comprising the amino acid sequence of SEQ ID NO: 1845, or an amino acid sequence having at least one, two, or three but no more than four modifications, e.g., substitutions, relative to SEQ ID NO: 1845; and a GBA protein comprising the amino acid sequence of SEQ ID NO: 1775, or an amino acid sequence at least 85% identical thereto;
(xii) a signal sequence comprising the amino acid sequence of SEQ ID NO: 1853, or an amino acid sequence at least 85% identical thereto; a GBA protein comprising the amino acid sequence of SEQ ID NO: 1775, or an amino acid sequence at least 85% identical thereto; and an enhancement element comprising the amino acid sequence of SEQ ID NO: 1808, or an amino acid sequence having at least one, two, or three but no more than four modifications, e.g., substitutions, relative to SEQ ID NO: 1808;
(xiii) a first signal sequence comprising the amino acid sequence of SEQ ID NO: 1853, or an amino acid sequence at least 85% identical thereto; a first enhancement element comprising the amino acid sequence of SEQ ID NO: 1802, or an amino acid sequence at least 85% identical thereto; a GBA protein comprising the amino acid sequence of SEQ ID NO: 1775, or an amino acid sequence at least 85% identical thereto; a furin cleavage site comprising the amino acid sequence of SEQ ID NO: 1854, or an amino acid sequence having at least one, two, or three but no more than four modifications, e.g., substitutions, relative to SEQ ID NO: 1854; a T2A polypeptide comprising the amino acid sequence of SEQ ID NO: 1855, or an amino acid sequence having at least one, two, or three but no more than four modifications, e.g., substitutions, relative to SEQ ID NO: 1855; a second signal sequence comprising the nucleotide sequence of SEQ ID NO: 1857, or an amino acid sequence having at least one, two, or three but no more than four modifications, e.g., substitutions, relative to SEQ ID NO: 1857; and a second enhancement element comprising the amino acid sequence of SEQ ID NO: 1789, or an amino acid sequence at least 85% identical thereto;
(xiv) a first signal sequence comprising the amino acid sequence of SEQ ID NO: 1853, or an amino acid sequence at least 85% identical thereto; a GBA protein comprising the amino acid sequence of SEQ ID NO: 1775, or an amino acid sequence at least 85% identical thereto; a linker comprising the amino acid sequence of SEQ ID NO: 1845, or an amino acid sequence having at least one, two, or three but no more than four modifications, e.g., substitutions, relative to SEQ ID NO: 1845; a first enhancement element comprising the amino acid sequence of SEQ ID NO: 1798, or an amino acid sequence having at least one, two, or three but no more than four modifications, e.g., substitutions, relative to SEQ ID NO: 1798; a furin cleavage site comprising the amino acid sequence of SEQ ID NO: 1854, or an amino acid sequence having at least one, two, or three but no more than four modifications, e.g., substitutions, relative to SEQ ID NO: 1854; a T2A polypeptide comprising the amino acid sequence of SEQ ID NO: 1855, or an amino acid sequence having at least one, two, or three but no more than four modifications, e.g., substitutions, relative to SEQ ID NO: 1855; a second signal sequence comprising the nucleotide sequence of SEQ ID NO: 1857, or an amino acid sequence having at least one, two, or three but no more than four modifications, e.g., substitutions, relative to SEQ ID NO: 1857; and an enhancement element comprising the amino acid sequence of SEQ ID NO: 1789, or an amino sequence at least 85% identical thereto; or
(xv) a first signal sequence comprising the amino acid sequence of SEQ ID NO: 1853, or an amino acid sequence at least 85% identical thereto; a first enhancement element comprising the amino acid sequence of SEQ ID NO: 1802, or an amino acid sequence at least 85% identical thereto; a GBA protein comprising the amino acid sequence of SEQ ID NO: 1775, or an amino acid sequence at least 85% identical thereto; a linker comprising the amino acid sequence of SEQ ID NO: 1845, or an amino acid sequence having at least one, two, or three but no more than four modifications, e.g., substitutions, relative to SEQ ID NO: 1845; a first enhancement element comprising the amino acid sequence of SEQ ID NO: 1798, or an amino acid sequence having at least one, two, or three but no more than four modifications, e.g., substitutions, relative to SEQ ID NO: 1798; a furin cleavage site comprising the amino acid sequence of SEQ ID NO: 1854, or an amino acid sequence having at least one, two, or three but no more than four modifications, e.g., substitutions, relative to SEQ ID NO: 1854; a T2A polypeptide comprising the amino acid sequence of SEQ ID NO: 1855, or an amino acid sequence having at least one, two, or three but no more than four modifications, e.g., substitutions, relative to SEQ ID NO: 1855; a second signal sequence comprising the nucleotide sequence of SEQ ID NO: 1857, or an amino acid sequence having at least one, two, or three but no more than four modifications, e.g., substitutions, relative to SEQ ID NO: 1857; and an enhancement element comprising the amino acid sequence of SEQ ID NO: 1789, or an amino acid sequence at least 85% identical thereto.

16. An isolated, e.g., recombinant, viral genome comprising a promoter operably linked to the nucleic acid of any one of claim 1-3 or 7-15.

17. The viral genome of claim 4-6 or 7-15, further comprising a promoter operably linked to the nucleic acid comprising the transgene encoding the GBA protein, wherein the promoter comprises a tissue specific promoter or a ubiquitous promoter.

18. The viral genome of claim 16 or 17, wherein the promoter comprises:
(i) a chicken β-actin (CBA) promoter and/or its derivative CAG, an EF-1α promoter, a CMV immediate-early enhancer and/or promoter, a (3 glucuronidase (GUSB) promoter, a ubiquitin C (UBC) promoter, a neuron-specific enolase (NSE), a platelet-derived growth factor (PDGF) promoter, a platelet-derived growth factor B-chain (PDGF-β) promoter, an intercellular adhesion molecule 2 (ICAM-2) promoter, a synapsin (Syn) promoter, a methyl-CpG binding protein 2 (MeCP2) promoter, a Ca2+/calmodulin-dependent protein kinase II (CaMKII) promoter, a metabotropic glutamate receptor 2 (mGluR2) promoter, a neurofilament light (NFL) or heavy (NFH) promoter, a β-globin minigene nβ2 promoter, a preproenkephalin (PPE) promoter, an enkephalin (Enk) and excitatory amino acid transporter 2 (EAAT2), a glial fibrillary acidic protein (GFAP) promoter, a myelin basic protein (MBP) promoter, a cardiovascular promoter (e.g., αMHC, cTnT, and CMV-MLC2k), a liver promoter (e.g., hAAT, TBG), a skeletal muscle promoter (e.g., desmin, MCK, C512) or a fragment, e.g., a truncation, or a functional variant thereof; and/or
(ii) the nucleotide sequence of any of SEQ ID NOs: 1832, 1833, 1834, 1835, 1836, 1839, 1840, or a nucleotide sequence at least 95% identical thereto.

19. The viral genome of any one of claims 16-18, wherein the promoter or functional variant thereof comprises:
(i) the nucleotide sequence of SEQ ID NO: 1834, or a nucleotide sequence at least 95% identical thereto; or
(ii) the nucleotide sequence of SEQ ID NO: 1839 or 1840, or a nucleotide sequence at least 95% identical thereto.

20. The viral genome of any one of claim 4-6 or 8-19, which further comprises an enhancer, optionally comprising the nucleotide sequence of SEQ ID NO: 1831, or a nucleotide sequence at least 95% identical thereto.

21. The viral genome of claim 4-6 or 8-20, which comprises an enhancer comprising the nucleotide sequence of SEQ ID NO: 1831, or a nucleotide sequence at least 95% identical thereto, and a promoter comprising the nucleotide sequence of SEQ ID NO: 1834, or a nucleotide sequence at least 95% identical thereto.

22. The viral genome of any one of claim 4-6 or 8-20, which further comprises:
(i) an inverted terminal repeat (ITR) sequence, optionally wherein the ITR sequence is positioned 5′ relative to the transgene encoding the GBA protein and/or the ITR sequence is positioned 3′ relative to the transgene encoding the GBA protein;
(ii) a polyadenylation (polyA) signal region;
(iii) an intron region;
(iv) an exon region, e.g., at least one, two, or three exon regions;
(v) a Kozak sequence

23. The viral genome of claim 22, wherein:
(i) the ITR comprises a nucleotide sequence of SEQ ID NO: 1829 or 1830, or a nucleotide sequence at least 95% identical thereto; or
(ii) the ITR positioned 5′ relative to the nucleic acid comprising the transgene encoding the GBA protein comprises the nucleotide sequence of SEQ ID NO: 1829, or a nucleotide sequence at least 95% identical thereto; and/or the ITR positioned 3′ relative to the nucleic acid comprising the transgene encoding the GBA protein comprises the nucleotide sequence of SEQ ID NO: 1830, or a nucleotide sequence at least 95% identical thereto.

24. The viral genome of claim 22 or 23, wherein:
(i) the polyadenylation (polyA) signal region comprises the nucleotide sequence of SEQ ID NO: 1846, or a nucleotide sequence at least 95% identical thereto;
(ii) the intron comprises a beta-globin intron; and/or
(iii) the intron comprises the nucleotide sequence of SEQ ID NO: 1842, or a nucleotide sequence at least 95% identical thereto.

25. The isolated nucleic acid of any one of claim 3, 5-6, or 8-24, or the viral genome of any one of claim 4-6 or 8-24, which comprises:
(i) at least 1-5 copies of the encoded miR binding site, e.g., at least 1, 2, 3, 4, or 5 copies;
(ii) at least 4 copies of an encoded miR binding sites, optionally wherein all four copies comprise the same miR binding site, or at least one, two, three, or all of the copies comprise a different miR binding site, optionally wherein the 4 copies of the encoded miR binding sites are continuous, e.g., not separated by a spacer; or are separated by a spacer.

26. The isolated nucleic acid of any one of claim 3, 5-6, or 8-25, or the viral genome of any one of claim 4-6 or 8-25, wherein the viral genome comprises:
(i) a first encoded miR183 binding site comprising the nucleotide sequence of SEQ ID NO: 1847, or a nucleotide sequence having at least 85%, 90%, 92%, 95%, 97%, 98%, or 99% sequence identity thereto; or a nucleotide sequence having at least one, two, three, four, five, six, or seven modifications, but no more than ten modifications of SEQ ID NO: 1847;
(ii) a first spacer sequence comprising the nucleotide sequence of SEQ ID NO: 1848, or a nucleotide sequence having at least one, two, or three modifications, but no more than four modifications of SEQ ID NO: 1848;
(iii) a second encoded miR183 binding site comprising the nucleotide sequence of SEQ ID NO: 1847, or a nucleotide sequence having at least 85%, 90%, 92%, 95%, 97%, 98%, or 99% sequence identity thereto; or a nucleotide sequence having at least one, two, three, four, five, six, or seven modifications, but no more than ten modifications of SEQ ID NO: 1847;
(iv) a second spacer sequence comprising the nucleotide sequence of SEQ ID NO: 1848, or a nucleotide sequence having at least one, two, or three modifications, but no more than four modifications of SEQ ID NO: 1848;
(v) a third encoded miR183 binding site comprising the nucleotide sequence of SEQ ID NO: 1847, or a nucleotide sequence having at least 85%, 90%, 92%, 95%, 97%, 98%, or 99% sequence identity thereto; or a nucleotide sequence having at least one, two, three, four, five, six, or seven modifications, but no more than ten modifications of SEQ ID NO: 1847;
(vi) a third spacer sequence comprising the nucleotide sequence of SEQ ID NO: 1848, or a nucleotide sequence having at least one, two, or three modifications, but no more than four modifications of SEQ ID NO: 1848; and
(vii) a fourth encoded miR183 binding site comprising the nucleotide sequence of SEQ ID NO: 1847, or a nucleotide sequence having at least 70%, 75%, 80%, 85%, 90%, 92%, 95%, 97%, 98%, or 99% sequence identity thereto; or a nucleotide sequence having at least one, two, three, four, five, six, or seven modifications, but no more than ten modifications of SEQ ID NO: 1847.

27. An isolated, e.g., recombinant, viral genome comprising in 5′ to 3′ order:
(i) a 5′ adeno-associated (AAV) ITR, optionally wherein the 5′ AAV ITR comprises the nucleotide sequence of SEQ ID NO: 1829, or a nucleotide sequence at least 95% identical thereto;
(ii) a CMVie enhancer, optionally wherein the CMVie enhancer comprises the nucleotide sequence of SEQ ID NO: 1831, or a nucleotide sequence at least 95% identical thereto;
(iii) a CB promoter or functional variant thereof, optionally wherein the CB promoter or functional variant thereof comprises the nucleotide sequence of SEQ ID NO: 1834, or a nucleotide sequence at least 95% identical thereto;
(iv) an intron, optionally wherein the intron comprises the nucleotide sequence of SEQ ID NO: 1842, or a nucleotide sequence at least 95% identical thereto;
(v) a nucleotide sequence encoding a signal sequence, optionally wherein the nucleotide sequence encoding the signal sequence comprises the nucleotide sequence of SEQ ID NO: 1850, or a nucleotide sequence at least 95% identical thereto;
(vi) a transgene encoding a GBA protein, wherein the nucleotide sequence encoding the GBA protein comprises the nucleotide sequence of SEQ ID NO: 1773 or a nucleotide sequence at least 88% identical to the nucleotide sequence of SEQ ID NO: 1773;
(vii) a polyA signal region, optionally wherein the polyA signal region comprises the nucleotide sequence of SEQ ID NO: 1846, or a nucleotide sequence at least 95% identical thereto; and
(viii) a 3′ AAV ITR, optionally wherein the 3′ AAV ITR comprises the nucleotide sequence of SEQ ID NO: 1830, or a nucleotide sequence at least 95% identical thereto.

28. An isolated, e.g., recombinant, viral genome comprising in 5′ to 3′ order:
(i) a 5′ adeno-associated (AAV) ITR, optionally wherein the 5′ AAV ITR comprises the nucleotide sequence of SEQ ID NO: 1829, or a nucleotide sequence at least 95% identical thereto;
(ii) a CMVie enhancer, optionally wherein the CMVie enhancer comprises the nucleotide sequence of SEQ ID NO: 1831, or a nucleotide sequence at least 95% identical thereto;
(iii) a CB promoter or functional variant thereof, optionally wherein the CB promoter or functional variant thereof comprises the nucleotide sequence of SEQ ID NO: 1834, or a nucleotide sequence at least 95% identical thereto;
(iv) an intron, optionally wherein the intron comprises the nucleotide sequence of SEQ ID NO: 1842, or a nucleotide sequence at least 95% identical thereto;
(v) a nucleotide sequence encoding a signal sequence, optionally wherein the nucleotide sequence encoding the signal sequence comprises the nucleotide sequence of SEQ ID NO: 1850, or a nucleotide sequence at least 95% identical thereto;
(vi) a transgene encoding a GBA protein, optionally wherein the nucleotide sequence encoding the GBA protein comprises the nucleotide sequence of SEQ ID NO: 1773 or a nucleotide sequence at least 88% identical to the nucleotide sequence of SEQ ID NO: 1773;
(vii) an encoded miR183 binding site, optionally wherein the encoded miR183 binding site comprises the nucleotide sequence of SEQ ID NO: 1847, or a nucleotide sequence having at least one, two, three, four, five, six, or seven modifications, but no more than ten modifications of SEQ ID NO: 1847;
(viii) a spacer sequence, optionally wherein the spacer comprises the nucleotide sequence of SEQ ID NO: 1848, or a nucleotide sequence having at least one, two, or three modifications, but no more than four modifications of SEQ ID NO: 1848;
(ix) an encoded miR183 binding site, optionally wherein the encoded miR183 binding site comprises the nucleotide sequence of SEQ ID NO: 1847, or a nucleotide sequence having at least one, two, three, four, five, six, or seven modifications, but no more than ten modifications of SEQ ID NO: 1847;
(x) a spacer sequence, optionally wherein the spacer comprises the nucleotide sequence of SEQ ID NO: 1848, or a nucleotide sequence having at least one, two, or three modifications, but no more than four modifications of SEQ ID NO: 1848;
(xi) an encoded miR183 binding site, optionally wherein the encoded miR183 binding site comprises the nucleotide sequence of SEQ ID NO: 1847, or a nucleotide sequence having at least one, two, three, four, five, six, or seven modifications, but no more than ten modifications of SEQ ID NO: 1847;
(xii) a spacer sequence, optionally wherein the spacer comprises the nucleotide sequence of SEQ ID NO: 1848, or a nucleotide sequence having at least one, two, or three modifications, but no more than four modifications of SEQ ID NO: 1848;
(xiii) an encoded miR183 binding site, optionally wherein the encoded miR183 binding site comprises the nucleotide sequence of SEQ ID NO: 1847, or a nucleotide sequence having at least one, two, three, four, five, six, or seven modifications, but no more than ten modifications of SEQ ID NO: 1847;
(xiv) a polyA signal region, optionally wherein the polyA signal region comprises the nucleotide sequence of SEQ ID NO: 1846, or a nucleotide sequence at least 95% identical thereto; and
(xv) a 3′ AAV ITR, optionally wherein the 3′ AAV ITR comprises the nucleotide sequence of SEQ ID NO: 1830, or a nucleotide sequence at least 95% identical thereto.

29. The viral genome of any one of claim 4-6 or 8-28, which comprises the nucleotide sequence of SEQ ID NO: 1812, 1829, 1759-1771, 1809-1811, 1813-1827, or 1870, ora nucleotide sequence at least 95% identical thereto.

30. The viral genome of any one of claim 4-6 or 8-29, which:
(i) is single stranded;
(ii) further comprises a nucleic acid encoding a capsid protein, e.g., a structural protein, wherein the capsid protein comprises a VP1 polypeptide, a VP2 polypeptide, and/or a VP3 polypeptide, optionally wherein the VP1 polypeptide, the VP2 polypeptide, and/or the VP3 polypeptide are encoded by at least one Cap gene; and/or
(iii) further comprises a nucleic acid encoding a Rep protein, e.g., a non-structural protein, wherein the Rep protein comprises a Rep78 protein, a Rep68, Rep52 protein, and/or a Rep40 protein, optionally wherein the Rep78 protein, the Rep68 protein, the Rep52 protein, and/or the Rep40 protein are encoded by at least one Rep gene.

31. An isolated, e.g., recombinant GBA protein encoded by the isolated nucleic acid of any one of claim 1-3 or 5-15 or the viral genome of any one of claim 4-6 or 8-30.

32. An isolated, e.g., recombinant, AAV particle comprising:
(i) a capsid protein; and
(ii) the viral genome of any one of claim 4-6 or 8-30.

33. The AAV particle of claim 32, wherein:
(i) the capsid protein comprises the amino acid sequence of SEQ ID NO: 138, or an amino acid sequence with at least 90% sequence identity thereto;
(ii) the capsid protein comprises an amino acid sequence having at least one, two or three modifications but not more than 30, 20 or 10 modifications of the amino acid sequence of SEQ ID NO: 138;
(iii) the capsid protein comprises the amino acid sequence of SEQ ID NO: 11, or an amino acid sequence with at least 90% sequence identity thereto;
(iv) the capsid protein comprises an amino acid sequence having at least one, two or three modifications but not more than 30, 20 or 10 modifications of the amino acid sequence of SEQ ID NO: 11;
(v) the capsid protein comprises an amino acid sequence encoded by the nucleotide sequence of SEQ ID NO: 137, or a sequence with at least 90% sequence identity thereto; and/or
(vi) the nucleotide sequence encoding the capsid protein comprises the nucleotide sequence of SEQ ID NO: 137, or a sequence with at least 90% sequence identity thereto.

34. The AAV particle of claim 32 or 33, wherein the capsid protein comprises:
(i) an amino acid substitution at position K449, e.g., a K449R substitution, numbered according to SEQ ID NO:138;
(ii) an insert comprising the amino acid sequence of TLAVPFK (SEQ ID NO: 1262), optionally wherein the insert is present immediately subsequent to position 588, relative to a reference sequence numbered according to SEQ ID NO:138;
(iii) an amino acid other than “A” at position 587 and/or an amino acid other than “Q” at position 588, numbered according to SEQ ID NO: 138;
(iv) the amino acid substitution of A587D and/or Q588G, numbered according to SEQ ID NO:138.

35. The AAV particle of any one of claims 32-34, wherein:
(i) the capsid protein comprises the amino acid sequence of SEQ ID NO: 1, or an amino acid sequence having at least 90%, 92%, 95%, 97%, 98%, or 99% sequence identity thereto;
(ii) the capsid protein comprises an amino acid sequence comprising at least one, two, or three modifications but no more than 30, 20, or 10 modifications, e.g., substitutions, relative to the amino acid sequence of SEQ ID NO: 1;
(iii) the capsid protein comprises an amino acid sequence encoded by the nucleotide sequence of SEQ ID NO: 2 or a nucleotide sequence having at least 90%, 92%, 95%, 97%, 98%, or 99% sequence identity thereto; and/or
(iv) the nucleotide sequence encoding the capsid protein comprises the nucleotide sequence of SEQ ID NO: 2, or a nucleotide sequence having at least 90%, 92%, 95%, 97%, 98%, or 99% sequence identity thereto.

36. A vector comprising the viral genome of any one of claim 4-6 or 8-30 or the nucleic acid of any one of claim 1-3 or 5-15.

37. A cell comprising the viral genome of any one of claim 4-6 or 8-30, the viral particle of any one of claims 32-35, or the vector of claim 36, optionally wherein the cell is a mammalian cell, e.g., an HEK293 cell, an insect cell, e.g., an Sf9 cell, or a bacterial cell.

38. A method of making an isolated, e.g., recombinant, AAV particle, the method comprising
(i) providing a host cell comprising the viral genome of any one of claim 4-6 or 8-30; and
(ii) incubating the host cell under conditions suitable to enclose the viral genome in a capsid protein, e.g., a VOY101 capsid protein;
thereby making the isolated AAV particle.

39. A pharmaceutical composition comprising the AAV particle of any one of claims 32-35, or an AAV particle comprising the viral genome of any one of claim 4-6 or 8-30, and a pharmaceutically acceptable excipient.

40. A method of delivering an exogenous GBA protein to a subject, comprising administering an effective amount of the pharmaceutical composition of claim 39, the AAV particle of any one of claims 32-35, an AAV particle comprising the viral genome of any one of claim 4-6 or 8-30, or an AAV particle comprising a viral genome comprising the nucleic acid of any one of claim 1-3 or 5-15, thereby delivering the exogenous GBA protein to the subject.

41. The method of claim 40, wherein the subject has, has been diagnosed with having, or is at risk of having:
(i) a disease associated with expression of GBA, e.g., aberrant or reduced GBA expression, e.g., expression of an GBA gene, GBA mRNA, and/or GBA protein; or
(ii) a neurodegenerative or neuromuscular disorder.

42. A method of treating a subject having or diagnosed with having a disease associated with GBA expression comprising administering an effective amount of the pharmaceutical composition of claim 39, the AAV particle of any one of claims 32-35, an AAV particle comprising the viral genome of any one of claim 4-6 or 8-30, or an AAV particle comprising a viral genome comprising the nucleic acid of any one of claim 1-3 or 5-15 thereby treating the disease associated with GBA expression in the subject.

43. A method of treating a subject having or diagnosed with having a neurodegenerative or neuromuscular disorder, comprising administering an effective amount of the pharmaceutical composition of claim 39, the AAV particle of any one of claims 32-35, an AAV particle comprising the viral genome of any one of claim 4-6 or 8-30, or an AAV particle comprising a viral genome comprising the nucleic acid of any one of claim 1-3 or 5-15, thereby treating the neurodegenerative or neuromuscular disorder in the subject.

44. The method of any one of claims 41-43, wherein the disease associated with expression of GBA or the neurodegenerative or neuromuscular disorder comprises Parkinson's Disease (PD), dementia with Lewy Bodies (DLB), Gaucher disease (GD), Spinal muscular atrophy (SMA), Multiple System Atrophy (MSA), or Multiple sclerosis (MS).

45. The method of claim 44, wherein the PD is:
(i) associated with a mutation in a GBA gene;
(ii) early onset PD (e.g., before 50 years of age) or juvenile PD (e.g., before 20 years of age);
(iii) a tremor dominant, postural instability gait difficulty PD (PIGD); or
(iv) a sporadic PD (e.g., a PD not associated with a mutation).

46. The method of claim 44, wherein the GD is:
(i) neuronopathic GD (e.g., affect a cell or tissue of the CNS, e.g., a cell or tissue of the brain and/or spinal cord), non-neuronopathic GD (e.g., does not affect a cell or tissue of the CNS), or combination thereof; or
(ii) Type I GD (GD1), Type 2 GD (GD2), or Type 3 GD (GD3), optionally wherein the GD1 is non-neuronopathic GD and the GD2 is a neuronopathic GD.

47. The method of any one of claims 40-46, wherein the subject:
(i) has a mutation in a GBA gene, GBA mRNA, and/or GBA protein; and/or
(ii) is a human, optionally wherein the subject is a juvenile (e.g., between 6 years of age to 20 years of age) or an adult (e.g., above 20 years of age).

48. The method of any one of claims 40-47, wherein the AAV particle is administered to the subject intravenously, intracerebrally, via intrathalamic (ITH) administration, intramuscularly, intrathecally, intracerebroventricularly, via intraparenchymal administration, via focused ultrasound (FUS), e.g., coupled with the intravenous administration of microbubbles (FUS-MB), or MRI-guided FUS coupled with intravenous administration, via intra-cisterna magna injection (ICM), or via dual ITH and ICM administration.

49. The method of any one of claims 40-48, wherein the AAV particle is administered via intravenous administration, optionally wherein the intravenous administration is via focused ultrasound (FUS), e.g., coupled with the intravenous administration of microbubbles (FUS-MB), or MRI-guided FUS coupled with intravenous administration.

50. The method of any one of claims 40-49, wherein the administration results in an increase in at least one, two, or all of:
(i) the level of GCase activity in a cell, tissue, (e.g., a cell or tissue of the CNS, e.g., the cortex, striatum, thalamus, cerebellum, and/or brainstem), and/or fluid (e.g., CSF and/or serum), of the subject, optionally wherein the level of GCase activity is increased by at least 3, 4, 4.5, 4.6, 4.7, 4.8, 4.9, 5, 5.1, 5.2, 5.3, 5.4, or 5.5 fold, as compared to a reference level, e.g., a subject that has not received treatment, e.g., has not been administered the AAV particle;
(ii) the level of viral genomes (VG) per cell in a CNS tissue (e.g., the cortex, striatum, thalamus, cerebellum, brainstem, and/or spinal cord) of the subject, optionally wherein the VG level is increased by greater than 50 VGs per cell, as compared to a peripheral tissue, wherein the level of VGs per cell is at least 4-10 fold lower than the levels in the CNS tissue, e.g., as measured by an assay as described herein; and/or
(iii) the level of GBA mRNA expression in a cell or tissue (e.g. a cell or tissue of the CNS, e.g., the cortex, thalamus, and/or brainstem), optionally wherein the level of GBA mRNA is increased by at least 100-1300 fold, e.g., 100 fold, 200 fold, 500 fold, 600 fold, 850 fold, 900 fold, 950 fold, 1000 fold, 1050 fold, 1100 fold, 1150 fold, 1200 fold, 1250 fold, or 1300 fold as compared to a reference level, e.g., a subject that has not received treatment (e.g., has not been administered the AAV particle), or endogenous GBA mRNA levels, e.g., as measured by an assay as described herein.

51. The method of any one of claims 40-50, further comprising administration of an additional therapeutic agent and/or therapy suitable for treatment or prevention of the disease associated GBA expression, the neurodegenerative disorder, and/or the neuromuscular disorder, optionally wherein the additional therapeutic agent comprises enzyme replacement therapy (ERT) (e.g., imiglucerase, velaglucerase alfa, or taliglucerase alfa); substrate reduction therapy (SRT) (e.g., eliglustat or miglustat), blood transfusion, levodopa, carbidopa, Safinamide, dopamine agonists (e.g., pramipexole, rotigotine, or ropinirole), anticholinergics (e.g., benztropine or trihexyphenidyl), cholinesterase inhibitors (e.g., rivastigmine, donepezil, or galantamine), an N-methyl-d-aspartate (NMDA) receptor antagonist (e.g., memantine), or a combination thereof.

52. The isolated nucleic acid of any one of claim 1-3 or 5-15, the viral genome of any one of claim 4-6 or 8-30, the AAV particle of any one of claims 32-35, or the pharmaceutical composition of claim 39, for use in the manufacture of a medicament.

53. The isolated nucleic acid of any one of claim 1-3 or 5-15, the viral genome of any one of claim 4-6 or 8-30, the AAV particle of any one of claims 32-35, or the pharmaceutical composition of claim 39, for use in the treatment of a disease associated with GBA expression, a neuromuscular and/or a neurodegenerative disorder.

54. Use of an effective amount of an AAV particle comprising the genome of any one of claim 4-6 or 8-30, an AAV particle comprising a genome comprising the nucleic acid of any one of claim 1-3 or 5-15, the AAV particle of any one of claims 32-35, or the pharmaceutical composition of claim 39, in the manufacture of a medicament for the treatment of a disease associated with GBA expression, a neuromuscular and/or a neurodegenerative disorder.

The application's sequence listing, which the Patent Office published only in electronic form, follows.

SEQUENCE LISTING (1873 sequences)

SEQ ID NO: 1 - protein, 743 aa, Artificial Sequence
  source: /note="Description of Artificial Sequence: Synthetic polypeptide"
MAADGYLPDWLEDNLSEGIREWWALKPGAPQPKANQQHQDNARGLVLPGYKYLGPGNGLDKGEPVNAADAAALEHDKAYDQQLKAGDNPYLKYNHADAEFQERLKEDTSFGGNLGRAVFQAKKRLLEPLGLVEEAAKTAPGKKRPVEQSPQEPDSSAGIGKSGAQPAKKRLNFGQTGDTESVPDPQPIGEPPAAPSGVGSLTMASGGGAPVADNNEGADGVGSSSGNWHCDSQWLGDRVITTSTRTWALPTYNNHLYKQISNSTSGGSSNDNAYFGYSTPWGYFDFNRFHCHFSPRDWQRLINNNWGFRPKRLNFKLFNIQVKEVTDNNGVKTIANNLTSTVQVFTDSDYQLPYVLGSAHEGCLPPFPADVFMIPQYGYLTLNDGSQAVGRSSFYCLEYFPSQMLRTGNNFQFSYEFENVPFHSSYAHSQSLDRLMNPLIDQYLYYLSKTINGSGQNQQTLKFSVAGPSNMAVQGRNYIPGPSYRQQRVSTTVTQNNNSEFAWPGASSWALNGRNSLMNPGPAMASHKEGEDRFFPLSGSLIFGKQGTGRDNVDADKVMITNEEEIKTTNPVATESYGQVATNHQSDGTLAVPFKAQAQTGWVQNQGILPGMVWQDRDVYLQGPIWAKIPHTDGNFHPSPLMGGFGMKHPPPQILIKNTPVPADPPTAFNKDKLNSFITQYSTGQVSVEIEWELQKENSKRWNPEIQYTSNYYKSNNVEFAVNTEGVYSEPRPIGTRYLTRNL

SEQ ID NO: 2 - DNA, 2232 bp, Artificial Sequence
  source: /note="Description of Artificial Sequence: Synthetic polynucleotide"
atggctgccgatggttatcttccagattggctcgaggacaaccttagtgaaggaattcgcgagtggtgggctttgaaacctggagcccctcaacccaaggcaaatcaacaacatcaagacaacgctcgaggtcttgtgcttccgggttacaaataccttggacccggcaacggactcgacaagggggagccggtcaacgcagcagacgcggcggccctcgagcacgacaaggcctacgaccagcagctcaaggccggagacaacccgtacctcaagtacaaccacgccgacgccgagttccaggagcggctcaaagaagatacgtcttttgggggcaacctcgggcgagcagtcttccaggccaaaaagaggcttcttgaacctcttggtctggttgaggaagcggctaagacggctcctggaaagaagaggcctgtagagcagtctcctcaggaaccggactcctccgcgggtattggcaaatcgggtgcacagcccgctaaaaagagactcaatttcggtcagactggcgacacagagtcagtcccagaccctcaaccaatcggagaacctcccgcagccccctcaggtgtgggatctcttacaatggcttcaggtggtggcgcaccagtggcagacaataacgaaggtgccgatggagtgggtagttcctcgggaaattggcattgcgattcccaatggctgggggacagagtcatcaccaccagcacccgaacctgggccctgcccacctacaacaatcacctctacaagcaaatctccaacagcacatctggaggatcttcaaatgacaacgcctacttcggctacagcaccccctgggggtattttgacttcaacagattccactgccacttctcaccacgtgactggcagcgactcatcaacaacaactggggattccggcctaagcgactcaacttcaagctcttcaacattcaggtcaaagaggttacggacaacaatggagtcaagaccatcgccaataaccttaccagcacggtccaggtcttcacggactcagactatcagctcccgtacgtgctcgggtcggctcacgagggctgcctcccgccgttcccagcggacgttttcatgattcctcagtacgggtatctgacgcttaatgatggaagccaggccgtgggtcgttcgtccttttactgcctggaatatttcccgtcgcaaatgctaagaacgggtaacaacttccagttcagctacgagtttgagaacgtacctttccatagcagctacgctcacagccaaagcctggaccgactaatgaatccactcatcgaccaatacttgtactatctctcaaagactattaacggttctggacagaatcaacaaacgctaaaattcagtgtggccggacccagcaacatggctgtccagggaagaaactacatacctggacccagctaccgacaacaacgtgtctcaaccactgtgactcaaaacaacaacagcgaatttgcttggcctggagcttcttcttgggctctcaatggacgtaatagcttgatgaatcctggacctgctatggccagccacaaagaaggagaggaccgtttctttcctttgtctggatctttaatttttggcaaacaaggaactggaagagacaacgtggatgcggacaaagtcatgataaccaacgaagaagaaattaaaactactaacccggtagcaacggagtcctatggacaagtggccacaaaccaccagagtgatgggactttggcggtgccttttaaggcacaggcgcagaccggctgggttcaaaaccaaggaatacttccgggtatggtttggcaggacagagatgtgtacctgcaaggacccatttgggccaaaattcctcacacggacggcaactttcacccttctccgctgatgggagggtttggaatgaagcacccgcctcctcagatcctcatcaaaaacacacctgtacctgcggatcctccaacggccttcaacaaggacaagctgaactctttcatcacccagtattctactggccaagtcagcgtggagatcgagtgggagctgcagaaggaaaacagcaagcgctggaacccggagatccagtacacttccaactattacaagtctaataatgttgaatttgctgttaatactgaaggtgtatatagtgaaccccgccccattggcaccagatacctgactcgtaatctgtaa

SEQ ID NO: 3 - DNA, 2232 bp, Artificial Sequence
  source: /note="Description of Artificial Sequence: Synthetic polynucleotide"
atggctgccgatggttatcttccagattggctcgaggacaaccttagtgaaggaattcgcgagtggtgggctttgaaacctggagcccctcaacccaaggcaaatcaacaacatcaagacaacgctcgaggtcttgtgcttccgggttacaaataccttggacccggcaacggactcgacaagggggagccggtcaacgcagcagacgcggcggccctcgagcacgacaaggcctacgaccagcagctcaaggccggagacaacccgtacctcaagtacaaccacgccgacgccgagttccaggagcggctcaaagaagatacgtcttttgggggcaacctcgggcgagcagtcttccaggccaaaaagaggcttcttgaacctcttggtctggttgaggaagcggctaagacggctcctggaaagaagaggcctgtagagcagtctcctcaggaaccggactcctccgcgggtattggcaaatcgggtgcacagcccgctaaaaagagactcaatttcggtcagactggcgacacagagtcagtcccagaccctcaaccaatcggagaacctcccgcagccccctcaggtgtgggatctcttacaatggcttcaggtggtggcgcaccagtggcagacaataacgaaggtgccgatggagtgggtagttcctcgggaaattggcattgcgattcccaatggctgggggacagagtcatcaccaccagcacccgaacctgggccctgcccacctacaacaatcacctctacaagcaaatctccaacagcacatctggaggatcttcaaatgacaacgcctacttcggctacagcaccccctgggggtattttgacttcaacagattccactgccacttctcaccacgtgactggcagcgactcatcaacaacaactggggattccggcctaagcgactcaacttcaagctcttcaacattcaggtcaaagaggttacggacaacaatggagtcaagaccatcgccaataaccttaccagcacggtccaggtcttcacggactcagactatcagctcccgtacgtgctcgggtcggctcacgagggctgcctcccgccgttcccagcggacgttttcatgattcctcagtacgggtatctgacgcttaatgatggaagccaggccgtgggtcgttcgtccttttactgcctggaatatttcccgtcgcaaatgctaagaacgggtaacaacttccagttcagctacgagtttgagaacgtacctttccatagcagctacgctcacagccaaagcctggaccgactaatgaatccactcatcgaccaatacttgtactatctctcaaagactattaacggttctggacagaatcaacaaacgctaaaattcagtgtggccggacccagcaacatggctgtccagggaagaaactacatacctggacccagctaccgacaacaacgtgtctcaaccactgtgactcaaaacaacaacagcgaatttgcttggcctggagcttcttcttgggctctcaatggacgtaatagcttgatgaatcctggacctgctatggccagccacaaagaaggagaggaccgtttctttcctttgtctggatctttaatttttggcaaacaaggaactggaagagacaacgtggatgcggacaaagtcatgataaccaacgaagaagaaattaaaactactaacccggtagcaacggagtcctatggacaagtggccacaaaccaccagagtgcccaaactttggcggtgccttttaaggcacaggcgcagaccggctgggttcaaaaccaaggaatacttccgggtatggtttggcaggacagagatgtgtacctgcaaggacccatttgggccaaaattcctcacacggacggcaactttcacccttctccgctgatgggagggtttggaatgaagcacccgcctcctcagatcctcatcaaaaacacacctgtacctgcggatcctccaacggccttcaacaaggacaagctgaactctttcatcacccagtattctactggccaagtcagcgtggagatcgagtgggagctgcagaaggaaaacagcaagcgctggaacccggagatccagtacacttccaactattacaagtctaataatgttgaatttgctgttaatactgaaggtgtatatagtgaaccccgccccattggcaccagatacctgactcgtaatctgtaa

SEQ ID NO: 4 - protein, 743 aa, Artificial Sequence
  source: /note="Description of Artificial Sequence: Synthetic polypeptide"
MAADGYLPDWLEDNLSEGIREWWALKPGAPQPKANQQHQDNARGLVLPGYKYLGPGNGLDKGEPVNAADAAALEHDKAYDQQLKAGDNPYLKYNHADAEFQERLKEDTSFGGNLGRAVFQAKKRLLEPLGLVEEAAKTAPGKKRPVEQSPQEPDSSAGIGKSGAQPAKKRLNFGQTGDTESVPDPQPIGEPPAAPSGVGSLTMASGGGAPVADNNEGADGVGSSSGNWHCDSQWLGDRVITTSTRTWALPTYNNHLYKQISNSTSGGSSNDNAYFGYSTPWGYFDFNRFHCHFSPRDWQRLINNNWGFRPKRLNFKLFNIQVKEVTDNNGVKTIANNLTSTVQVFTDSDYQLPYVLGSAHEGCLPPFPADVFMIPQYGYLTLNDGSQAVGRSSFYCLEYFPSQMLRTGNNFQFSYEFENVPFHSSYAHSQSLDRLMNPLIDQYLYYLSRTINGSGQNQQTLKFSVAGPSNMAVQGRNYIPGPSYRQQRVSTTVTQNNNSEFAWPGASSWALNGRNSLMNPGPAMASHKEGEDRFFPLSGSLIFGKQGTGRDNVDADKVMITNEEEIKTTNPVATESYGQVATNHQSDGTLAVPFKAQAQTGWVQNQGILPGMVWQDRDVYLQGPIWAKIPHTDGNFHPSPLMGGFGMKHPPPQILIKNTPVPADPPTAFNKDKLNSFITQYSTGQVSVEIEWELQKENSKRWNPEIQYTSNYYKSNNVEFAVNTEGVYSEPRPIGTRYLTRNL

SEQ ID NO: 5 - protein, 743 aa, Artificial Sequence
  source: /note="Description of Artificial Sequence: Synthetic polypeptide"
MAADGYLPDWLEDNLSEGIREWWALKPGAPQPKANQQHQDNARGLVLPGYKYLGPGNGLDKGEPVNAADAAALEHDKAYDQQLKAGDNPYLKYNHADAEFQERLKEDTSFGGNLGRAVFQAKKRLLEPLGLVEEAAKTAPGKKRPVEQSPQEPDSSAGIGKSGAQPAKKRLNFGQTGDTESVPDPQPIGEPPAAPSGVGSLTMASGGGAPVADNNEGADGVGSSSGNWHCDSQWLGDRVITTSTRTWALPTYNNHLYKQISNSTSGGSSNDNAYFGYSTPWGYFDFNRFHCHFSPRDWQRLINNNWGFRPKRLNFKLFNIQVKEVTDNNGVKTIANNLTSTVQVFTDSDYQLPYVLGSAHEGCLPPFPADVFMIPQYGYLTLNDGSQAVGRSSFYCLEYFPSQMLRTGNNFQFSYEFENVPFHSSYAHSQSLDRLMNPLIDQYLYYLSRTINGSGQNQQTLKFSVAGPSNMAVQGRNYIPGPSYRQQRVSTTVTQNNNSEFAWPGASSWALNGRNSLMNPGPAMASHKEGEDRFFPLSGSLIFGKQGTGRDNVDADKVMITNEEEIKTTNPVATESYGQVATNHQSAQTLAVPFKAQAQTGWVQNQGILPGMVWQDRDVYLQGPIWAKIPHTDGNFHPSPLMGGFGMKHPPPQILIKNTPVPADPPTAFNKDKLNSFITQYSTGQVSVEIEWELQKENSKRWNPEIQYTSNYYKSNNVEFAVNTEGVYSEPRPIGTRYLTRNL

SEQ ID NO: 6 - DNA, 2232 bp, Artificial Sequence
  source: /note="Description of Artificial Sequence: Synthetic polynucleotide"
atggctgccgatggttatcttccagattggctcgaggacaaccttagtgaaggaattcgcgagtggtgggctttgaaacctggagcccctcaacccaaggcaaatcaacaacatcaagacaacgctcgaggtcttgtgcttccgggttacaaataccttggacccggcaacggactcgacaagggggagccggtcaacgcagcagacgcggcggccctcgagcacgacaaggcctacgaccagcagctcaaggccggagacaacccgtacctcaagtacaaccacgccgacgccgagttccaggagcggctcaaagaagatacgtcttttgggggcaacctcgggcgagcagtcttccaggccaaaaagaggcttcttgaacctcttggtctggttgaggaagcggctaagacggctcctggaaagaagaggcctgtagagcagtctcctcaggaaccggactcctccgcgggtattggcaaatcgggtgcacagcccgctaaaaagagactcaatttcggtcagactggcgacacagagtcagtcccagaccctcaaccaatcggagaacctcccgcagccccctcaggtgtgggatctcttacaatggcttcaggtggtggcgcaccagtggcagacaataacgaaggtgccgatggagtgggtagttcctcgggaaattggcattgcgattcccaatggctgggggacagagtcatcaccaccagcacccgaacctgggccctgcccacctacaacaatcacctctacaagcaaatctccaacagcacatctggaggatcttcaaatgacaacgcctacttcggctacagcaccccctgggggtattttgacttcaacagattccactgccacttctcaccacgtgactggcagcgactcatcaacaacaactggggattccggcctaagcgactcaacttcaagctcttcaacattcaggtcaaagaggttacggacaacaatggagtcaagaccatcgccaataaccttaccagcacggtccaggtcttcacggactcagactatcagctcccgtacgtgctcgggtcggctcacgagggctgcctcccgccgttcccagcggacgttttcatgattcctcagtacgggtatctgacgcttaatgatggaagccaggccgtgggtcgttcgtccttttactgcctggaatatttcccgtcgcaaatgctaagaacgggtaacaacttccagttcagctacgagtttgagaacgtacctttccatagcagctacgctcacagccaaagcctggaccgactaatgaatccactcatcgaccaatacttgtactatctctctagaactattaacggttctggacagaatcaacaaacgctaaaattcagtgtggccggacccagcaacatggctgtccagggaagaaactacatacctggacccagctaccgacaacaacgtgtctcaaccactgtgactcaaaacaacaacagcgaatttgcttggcctggagcttcttcttgggctctcaatggacgtaatagcttgatgaatcctggacctgctatggccagccacaaagaaggagaggaccgtttctttcctttgtctggatctttaatttttggcaaacaaggtaccggcagagacaacgtggatgcggacaaagtcatgataaccaacgaagaagaaattaaaactactaacccggtagcaacggagtcctatggacaagtggccacaaaccaccagagtgcccaaactttggcggtgccttttaaggcacaggcgcagaccggttgggttcaaaaccaaggaatacttccgggtatggtttggcaggacagagatgtgtacctgcaaggacccatttgggccaaaattcctcacacggacggcaactttcacccttctccgctgatgggagggtttggaatgaagcacccgcctcctcagatcctcatcaaaaacacacctgtacctgcggatcctccaacggccttcaacaaggacaagctgaactctttcatcacccagtattctactggccaagtcagcgtggagatcgagtgggagctgcagaaggaaaacagcaagcgctggaacccggagatccagtacacttccaactattacaagtctaataatgttgaatttgctgttaatactgaaggtgtatatagtgaaccccgccccattggcaccagatacctgactcgtaatctgtaa

SEQ ID NO: 7 - protein, 736 aa, Artificial Sequence
  source: /note="Description of Artificial Sequence: Synthetic polypeptide"
MAADGYLPDWLEDNLSEGIREWWALKPGAPQPKANQQHQDNARGLVLPGYKYLGPGNGLDKGEPVNAADAAALEHDKAYDQQLKAGDNPYLKYNHADAEFQERLKEDTSFGGNLGRAVFQAKKRLLEPLGLVEEAAKTAPGKKRPVEQSPQEPDSSAGIGKSGAQPAKKRLNFGQTGDTESVPDPQPIGEPPAAPSGVGSLTMASGGGAPVADNNEGADGVGSSSGNWHCDSQWLGDRVITTSTRTWALPTYNNHLYKQISNSTSGGSSNDNAYFGYSTPWGYFDFNRFHCHFSPRDWQRLINNNWGFRPKRLNFKLFNIQVKEVTDNNGVKTIANNLTSTVQVFTDSDYQLPYVLGSAHEGCLPPFPADVFMIPQYGYLTLNDGSQAVGRSSFYCLEYFPSQMLRTGNNFQFSYEFENVPFHSSYAHSQSLDRLMNPLIDQYLYYLSRTIQSSQTPRQTLKFSVAGPSNMAVQGRNYIPGPSYRQQRVSTTVTQNNNSEFAWPGASSWALNGRNSLMNPGPAMASHKEGEDRFFPLSGSLIFGKQGTGRDNVDADKVMITNEEEIKTTNPVATESYGQVATNHQSAQAQAQTGWVQNQGILPGMVWQDRDVYLQGPIWAKIPHTDGNFHPSPLMGGFGMKHPPPQILIKNTPVPADPPTAFNKDKLNSFITQYSTGQVSVEIEWELQKENSKRWNPEIQYTSNYYKSNNVEFAVNTEGVYSEPRPIGTRYLTRNL

SEQ ID NO: 8 - protein, 743 aa, Artificial Sequence
  source: /note="Description of Artificial Sequence: Synthetic polypeptide"
MAADGYLPDWLEDNLSEGIREWWALKPGAPQPKANQQHQDNARGLVLPGYKYLGPGNGLDKGEPVNAADAAALEHDKAYDQQLKAGDNPYLKYNHADAEFQERLKEDTSFGGNLGRAVFQAKKRLLEPLGLVEEAAKTAPGKKRPVEQSPQEPDSSAGIGKSGAQPAKKRLNFGQTGDTESVPDPQPIGEPPAAPSGVGSLTMASGGGAPVADNNEGADGVGSSSGNWHCDSQWLGDRVITTSTRTWALPTYNNHLYKQISNSTSGGSSNDNAYFGYSTPWGYFDFNRFHCHFSPRDWQRLINNNWGFRPKRLNFKLFNIQVKEVTDNNGVKTIANNLTSTVQVFTDSDYQLPYVLGSAHEGCLPPFPADVFMIPQYGYLTLNDGSQAVGRSSFYCLEYFPSQMLRTGNNFQFSYEFENVPFHSSYAHSQSLDRLMNPLIDQYLYYLSRTIILGTGTSQTLKFSVAGPSNMAVQGRNYIPGPSYRQQRVSTTVTQNNNSEFAWPGASSWALNGRNSLMNPGPAMASHKEGEDRFFPLSGSLIFGKQGTGRDNVDADKVMITNEEEIKTTNPVATESYGQVATNHQSAQTRTNPEAAQAQTGWVQNQGILPGMVWQDRDVYLQGPIWAKIPHTDGNFHPSPLMGGFGMKHPPPQILIKNTPVPADPPTAFNKDKLNSFITQYSTGQVSVEIEWELQKENSKRWNPEIQYTSNYYKSNNVEFAVNTEGVYSEPRPIGTRYLTRNL

SEQ ID NO: 9 - protein, 743 aa, Artificial Sequence
  source: /note="Description of Artificial Sequence: Synthetic polypeptide"
MAADGYLPDWLEDNLSEGIREWWALKPGAPQPKANQQHQDNARGLVLPGYKYLGPGNGLDKGEPVNAADAAALEHDKAYDQQLKAGDNPYLKYNHADAEFQERLKEDTSFGGNLGRAVFQAKKRLLEPLGLVEEAAKTAPGKKRPVEQSPQEPDSSAGIGKSGAQPAKKRLNFGQTGDTESVPDPQPIGEPPAAPSGVGSLTMASGGGAPVADNNEGADGVGSSSGNWHCDSQWLGDRVITTSTRTWALPTYNNHLYKQISNSTSGGSSNDNAYFGYSTPWGYFDFNRFHCHFSPRDWQRLINNNWGFRPKRLNFKLFNIQVKEVTDNNGVKTIANNLTSTVQVFTDSDYQLPYVLGSAHEGCLPPFPADVFMIPQYGYLTLNDGSQAVGRSSFYCLEYFPSQMLRTGNNFQFSYEFENVPFHSSYAHSQSLDRLMNPLIDQYLYYLSRTIILGTGTSQTLKFSVAGPSNMAVQGRNYIPGPSYRQQRVSTTVTQNNNSEFAWPGASSWALNGRNSLMNPGPAMASHKEGEDRFFPLSGSLIFGKQGTGRDNVDADKVMITNEEEIKTTNPVATESYGQVATNHQSAQNGGTSSSAQAQTGWVQNQGILPGMVWQDRDVYLQGPIWAKIPHTDGNFHPSPLMGGFGMKHPPPQILIKNTPVPADPPTAFNKDKLNSFITQYSTGQVSVEIEWELQKENSKRWNPEIQYTSNYYKSNNVEFAVNTEGVYSEPRPIGTRYLTRNL

SEQ ID NO: 10 - protein, 743 aa, Artificial Sequence
  source: /note="Description of Artificial Sequence: Synthetic polypeptide"
MAADGYLPDWLEDNLSEGIREWWALKPGAPQPKANQQHQDNARGLVLPGYKYLGPGNGLDKGEPVNAADAAALEHDKAYDQQLKAGDNPYLKYNHADAEFQERLKEDTSFGGNLGRAVFQAKKRLLEPLGLVEEAAKTAPGKKRPVEQSPQEPDSSAGIGKSGAQPAKKRLNFGQTGDTESVPDPQPIGEPPAAPSGVGSLTMASGGGAPVADNNEGADGVGSSSGNWHCDSQWLGDRVITTSTRTWALPTYNNHLYKQISNSTSGGSSNDNAYFGYSTPWGYFDFNRFHCHFSPRDWQRLINNNWGFRPKRLNFKLFNIQVKEVTDNNGVKTIANNLTSTVQVFTDSDYQLPYVLGSAHEGCLPPFPADVFMIPQYGYLTLNDGSQAVGRSSFYCLEYFPSQMLRTGNNFQFSYEFENVPFHSSYAHSQSLDRLMNPLIDQYLYYLSRTINGSGQNQQTLKFSVAGPSNMAVQGRNYIPGPSYRQQRVSTTVTQNNNSEFAWPGASSWALNGRNSLMNPGPAMASHKEGEDRFFPLSGSLIFGKQGTGRDNVDADKVMITNEEEIKTTNPVATESYGQVATNHQSAQQAVRTSLAQAQTGWVQNQGILPGMVWQDRDVYLQGPIWAKIPHTDGNFHPSPLMGGFGMKHPPPQILIKNTPVPADPPTAFNKDKLNSFITQYSTGQVSVEIEWELQKENSKRWNPEIQYTSNYYKSNNVEFAVNTEGVYSEPRPIGTRYLTRNL

SEQ ID NO: 11 - protein, 736 aa, Artificial Sequence
  source: /note="Description of Artificial Sequence: Synthetic polypeptide"
MAADGYLPDWLEDNLSEGIREWWALKPGAPQPKANQQHQDNARGLVLPGYKYLGPGNGLDKGEPVNAADAAALEHDKAYDQQLKAGDNPYLKYNHADAEFQERLKEDTSFGGNLGRAVFQAKKRLLEPLGLVEEAAKTAPGKKRPVEQSPQEPDSSAGIGKSGAQPAKKRLNFGQTGDTESVPDPQPIGEPPAAPSGVGSLTMASGGGAPVADNNEGADGVGSSSGNWHCDSQWLGDRVITTSTRTWALPTYNNHLYKQISNSTSGGSSNDNAYFGYSTPWGYFDFNRFHCHFSPRDWQRLINNNWGFRPKRLNFKLFNIQVKEVTDNNGVKTIANNLTSTVQVFTDSDYQLPYVLGSAHEGCLPPFPADVFMIPQYGYLTLNDGSQAVGRSSFYCLEYFPSQMLRTGNNFQFSYEFENVPFHSSYAHSQSLDRLMNPLIDQYLYYLSRTINGSGQNQQTLKFSVAGPSNMAVQGRNYIPGPSYRQQRVSTTVTQNNNSEFAWPGASSWALNGRNSLMNPGPAMASHKEGEDRFFPLSGSLIFGKQGTGRDNVDADKVMITNEEEIKTTNPVATESYGQVATNHQSAQAQAQTGWVQNQGILPGMVWQDRDVYLQGPIWAKIPHTDGNFHPSPLMGGFGMKHPPPQILIKNTPVPADPPTAFNKDKLNSFITQYSTGQVSVEIEWELQKENSKRWNPEIQYTSNYYKSNNVEFAVNTEGVYSEPRPIGTRYLTRNL

SEQ ID NO: 12 - DNA, 2211 bp, Artificial Sequence
  source: /note="Description of Artificial Sequence: Synthetic polynucleotide"
atggctgccgatggttatcttccagattggctcgaggacaacctctctgagggcattcgcgagtggtgggacttgaaacctggagccccgaagcccaaagccaaccagcaaaagcaggacgacggccggggtctggtgcttcctggctacaagtacctcggacccttcaacggactcgacaagggggagcccgtcaacgcggcggacgcagcggccctcgagcacgacaaggcctacgaccagcagctcaaagcgggtgacaatccgtacctgcggtataaccacgccgacgccgagtttcaggagcgtctgcaagaagatacgtcttttgggggcaacctcgggcgagcagtcttccaggccaagaagcgggttctcgaacctctcggtctggttgaggaaggcgctaagacggctcctggaaagaaacgtccggtagagcagtcgccacaagagccagactcctcctcgggcatcggcaagacaggccagcagcccgctaaaaagagactcaattttggtcagactggcgactcagagtcagtccccgatccacaacctctcggagaacctccagcaacccccgctgctgtgggacctactacaatggcttcaggcggtggcgcaccaatggcagacaataacgaaggcgccgacggagtgggtaatgcctcaggaaattggcattgcgattccacatggctgggcgacagagtcatcaccaccagcacccgcacctgggccttgcccacctacaataaccacctctacaagcaaatctccagtgcttcaacgggggccagcaacgacaaccactacttcggctacagcaccccctgggggtattttgatttcaacagattccactgccacttttcaccacgtgactggcagcgactcatcaacaacaattggggattccggcccaagagactcaacttcaaactcttcaacatccaagtcaaggaggtcacgacgaatgatggcgtcacaaccatcgctaataaccttaccagcacggttcaagtcttctcggactcggagtaccagcttccgtacgtcctcggctctgcgcaccagggctgcctccctccgttcccggcggacgtgttcatgattccgcaatacggctacctgacgctcaacaatggcagccaagccgtgggacgttcatccttttactgcctggaatatttcccttctcagatgctgagaacgggcaacaactttaccttcagctacacctttgaggaagtgcctttccacagcagctacgcgcacagccagagcctggaccggctgatgaatcctctcatcgaccaatacctgtattacctgaacagaactcaaaatcagtccggaagtgcccaaaacaaggacttgctgtttagccgtgggtctccagctggcatgtctgttcagcccaaaaactggctacctggaccctgttatcggcagcagcgcgtttctaaaacaaaaacagacaacaacaacagcaattttacctggactggtgcttcaaaatataacctcaatgggcgtgaatccatcatcaaccctggcactgctatggcctcacacaaagacgacgaagacaagttctttcccatgagcggtgtcatgatttttggaaaagagagcgccggagcttcaaacactgcattggacaatgtcatgattacagacgaagaggaaattaaagccactaaccctgtggccaccgaaagatttgggaccgtggcagtcaatttccagagcagcagcacagaccctgcgaccggagatgtgcatgctatgggagcattacctggcatggtgtggcaagatagagacgtgtacctgcagggtcccatttgggccaaaattcctcacacagatggacactttcacccgtctcctcttatgggcggctttggactcaagaacccgcctcctcagatcctcatcaaaaacacgcctgttcctgcgaatcctccggcggagttttcagctacaaagtttgcttcattcatcacccaatactccacaggacaagtgagtgtggaaattgaatgggagctgcagaaagaaaacagcaagcgctggaatcccgaagtgcagtacacatccaattatgcaaaatctgccaacgttgattttactgtggacaacaatggactttatactgagcctcgccccattggcacccgttaccttacccgtcccctgtaa

SEQ ID NO: 13 - protein, 736 aa, Adeno-associated virus 1
MAADGYLPDWLEDNLSEGIREWWDLKPGAPKPKANQQKQDDGRGLVLPGYKYLGPFNGLDKGEPVNAADAAALEHDKAYDQQLKAGDNPYLRYNHADAEFQERLQEDTSFGGNLGRAVFQAKKRVLEPLGLVEEGAKTAPGKKRPVEQSPQEPDSSSGIGKTGQQPAKKRLNFGQTGDSESVPDPQPLGEPPATPAAVGPTTMASGGGAPMADNNEGADGVGNASGNWHCDSTWLGDRVITTSTRTWALPTYNNHLYKQISSASTGASNDNHYFGYSTPWGYFDFNRFHCHFSPRDWQRLINNNWGFRPKRLNFKLFNIQVKEVTTNDGVTTIANNLTSTVQVFSDSEYQLPYVLGSAHQGCLPPFPADVFMIPQYGYLTLNNGSQAVGRSSFYCLEYFPSQMLRTGNNFTFSYTFEEVPFHSSYAHSQSLDRLMNPLIDQYLYYLNRTQNQSGSAQNKDLLFSRGSPAGMSVQPKNWLPGPCYRQQRVSKTKTDNNNSNFTWTGASKYNLNGRESIINPGTAMASHKDDEDKFFPMSGVMIFGKESAGASNTALDNVMITDEEEIKATNPVATERFGTVAVNFQSSSTDPATGDVHAMGALPGMVWQDRDVYLQGPIWAKIPHTDGHFHPSPLMGGFGLKNPPPQILIKNTPVPANPPAEFSATKFASFITQYSTGQVSVEIEWELQKENSKRWNPEVQYTSNYAKSANVDFTVDNNGLYTEPRPIGTRYLTRPL

SEQ ID NO: 14 - DNA, 4718 bp, Adeno-associated virus 1
ttgcccactccctctctgcgcgctcgctcgctcggtggggcctgcggaccaaaggtccgcagacggcagagctctgctctgccggccccaccgagcgagcgagcgcgcagagagggagtgggcaactccatcactaggggtaatcgcgaagcgcctcccacgctgccgcgtcagcgctgacgtaaattacgtcataggggagtggtcctgtattagctgtcacgtgagtgcttttgcgacattttgcgacaccacgtggccatttagggtatatatggccgagtgagcgagcaggatctccattttgaccgcgaaatttgaacgagcagcagccatgccgggcttctacgagatcgtgatcaaggtgccgagcgacctggacgagcacctgccgggcatttctgactcgtttgtgagctgggtggccgagaaggaatgggagctgcccccggattctgacatggatctgaatctgattgagcaggcacccctgaccgtggccgagaagctgcagcgcgacttcctggtccaatggcgccgcgtgagtaaggccccggaggccctcttctttgttcagttcgagaagggcgagtcctacttccacctccatattctggtggagaccacgggggtcaaatccatggtgctgggccgcttcctgagtcagattagggacaagctggtgcagaccatctaccgcgggatcgagccgaccctgcccaactggttcgcggtgaccaagacgcgtaatggcgccggaggggggaacaaggtggtggacgagtgctacatccccaactacctcctgcccaagactcagcccgagctgcagtgggcgtggactaacatggaggagtatataagcgcctgtttgaacctggccgagcgcaaacggctcgtggcgcagcacctgacccacgtcagccagacccaggagcagaacaaggagaatctgaaccccaattctgacgcgcctgtcatccggtcaaaaacctccgcgcgctacatggagctggtcgggtggctggtggaccggggcatcacctccgagaagcagtggatccaggaggaccaggcctcgtacatctccttcaacgccgcttccaactcgcggtcccagatcaaggccgctctggacaatgccggcaagatcatggcgctgaccaaatccgcgcccgactacctggtaggccccgctccgcccgcggacattaaaaccaaccgcatctaccgcatcctggagctgaacggctacgaacctgcctacgccggctccgtctttctcggctgggcccagaaaaggttcgggaagcgcaacaccatctggctgtttgggccggccaccacgggcaagaccaacatcgcggaagccatcgcccacgccgtgcccttctacggctgcgtcaactggaccaatgagaactttcccttcaatgattgcgtcgacaagatggtgatctggtgggaggagggcaagatgacggccaaggtcgtggagtccgccaaggccattctcggcggcagcaaggtgcgcgtggaccaaaagtgcaagtcgtccgcccagatcgaccccacccccgtgatcgtcacctccaacaccaacatgtgcgccgtgattgacgggaacagcaccaccttcgagcaccagcagccgttgcaggaccggatgttcaaatttgaactcacccgccgtctggagcatgactttggcaaggtgacaaagcaggaagtcaaagagttcttccgctgggcgcaggatcacgtgaccgaggtggcgcatgagttctacgtcagaaagggtggagccaacaaaagacccgcccccgatgacgcggataaaagcgagcccaagcgggcctgcccctcagtcgcggatccatcgacgtcagacgcggaaggagctccggtggactttgccgacaggtaccaaaacaaatgttctcgtcacgcgggcatgcttcagatgctgtttccctgcaagacatgcgagagaatgaatcagaatttcaacatttgcttcacgcacgggacgagagactgttcagagtgcttccccggcgtgtcagaatctcaaccggtcgtcagaaagaggacgtatcggaaactctgtgccattcatcatctgctggggcgggctcccgagattgcttgctcggcctgcgatctggtcaacgtggacctggatgactgtgtttctgagcaataaatgacttaaaccaggtatggctgccgatggttatcttccagattggctcgaggacaacctctctgagggcattcgcgagtggtgggacttgaaacctggagccccgaagcccaaagccaaccagcaaaagcaggacgacggccggggtctggtgcttcctggctacaagtacctcggacccttcaacggactcgacaagggggagcccgtcaacgcggcggacgcagcggccctcgagcacgacaaggcctacgaccagcagctcaaagcgggtgacaatccgtacctgcggtataaccacgccgacgccgagtttcaggagcgtctgcaagaagatacgtcttttgggggcaacctcgggcgagcagtcttccaggccaagaagcgggttctcgaacctctcggtctggttgaggaaggcgctaagacggctcctggaaagaaacgtccggtagagcagtcgccacaagagccagactcctcctcgggcatcggcaagacaggccagcagcccgctaaaaagagactcaattttggtcagactggcgactcagagtcagtccccgatccacaacctctcggagaacctccagcaacccccgctgctgtgggacctactacaatggcttcaggcggtggcgcaccaatggcagacaataacgaaggcgccgacggagtgggtaatgcctcaggaaattggcattgcgattccacatggctgggcgacagagtcatcaccaccagcacccgcacctgggccttgcccacctacaataaccacctctacaagcaaatctccagtgcttcaacgggggccagcaacgacaaccactacttcggctacagcaccccctgggggtattttgatttcaacagattccactgccacttttcaccacgtgactggcagcgactcatcaacaacaattggggattccggcccaagagactcaacttcaaactcttcaacatccaagtcaaggaggtcacgacgaatgatggcgtcacaaccatcgctaataaccttaccagcacggttcaagtcttctcggactcggagtaccagcttccgtacgtcctcggctctgcgcaccagggctgcctccctccgttcccggcggacgtgttcatgattccgcaatacggctacctgacgctcaacaatggcagccaagccgtgggacgttcatccttttactgcctggaatatttcccttctcagatgctgagaacgggcaacaactttaccttcagctacacctttgaggaagtgcctttccacagcagctacgcgcacagccagagcctggaccggctgatgaatcctctcatcgaccaatacctgtattacctgaacagaactcaaaatcagtccggaagtgcccaaaacaaggacttgctgtttagccgtgggtctccagctggcatgtctgttcagcccaaaaactggctacctggaccctgttatcggcagcagcgcgtttctaaaacaaaaacagacaacaacaacagcaattttacctggactggtgcttcaaaatataacctcaatgggcgtgaatccatcatcaaccctggcactgctatggcctcacacaaagacgacgaagacaagttctttcccatgagcggtgtcatgatttttggaaaagagagcgccggagcttcaaacactgcattggacaatgtcatgattacagacgaagaggaaattaaagccactaaccctgtggccaccgaaagatttgggaccgtggcagtcaatttccagagcagcagcacagaccctgcgaccggagatgtgcatgctatgggagcattacctggcatggtgtggcaagatagagacgtgtacctgcagggtcccatttgggccaaaattcctcacacagatggacactttcacccgtctcctcttatgggcggctttggactcaagaacccgcctcctcagatcctcatcaaaaacacgcctgttcctgcgaatcctccggcggagttttcagctacaaagtttgcttcattcatcacccaatactccacaggacaagtgagtgtggaaattgaatgggagctgcagaaagaaaacagcaagcgctggaatcccgaagtgcagtacacatccaattatgcaaaatctgccaacgttgattttactgtggacaacaatggactttatactgagcctcgccccattggcacccgttaccttacccgtcccctgtaattacgtgttaatcaataaaccggttgattcgtttcagttgaactttggtctcctgtccttcttatcttatcggttaccatggttatagcttacacattaactgcttggttgcgcttcgcgataaaagacttacgtcatcgggttacccctagtgatggagttgcccactccctctctgcgcgctcgctcgctcggtggggcctgcggaccaaaggtccgcagacggcagagctctgctctgccggccccaccgagcgagcgagcgcgcagagagggagtgggcaa

SEQ ID NO: 15 - DNA, 3131 bp, Artificial Sequence
  source: /note="Description of Artificial Sequence: Synthetic polynucleotide"
gcggccgcgaattcgcccttggctgcgtcaactggaccaatgagaactttcccttcaatgattgcgtcgacaagatggtgatctggtgggaggagggcaagatgacggccaaggtcgtggagtccgccaaggccattctcggcggcagcaaggtgcgcgtggaccaaaagtgcaagtcgtccgcccagatcgaccccacccccgtgatcgtcacctccaacaccaacatgtgcgccgtgattgacgggaacagcaccaccttcgagcaccagcagcctctccaggaccggatgtttaagttcgaactcacccgccgtctggagcacgactttggcaaggtgacaaagcaggaagtcaaagagttcttccgctgggccagtgatcacgtgaccgaggtggcgcatgagttttacgtcagaaagggcggagccagcaaaagacccgcccccgatgacgcggataaaagcgagcccaagcgggcctgcccctcagtcgcggatccatcgacgtcagacgcggaaggagctccggtggactttgccgacaggtaccaaaacaaatgttctcgtcacgcgggcatgcttcagatgctgtttccctgcaaaacgtgcgagagaatgaatcggaatttcaacatttgcttcacacacggggtcagagactgctcagagtgtttccccggcgtgtcagaatctcaaccggtcgtcagaaagaggacgtatcggaaactccgtgcgattcatcatctgctggggcgggctcccgagattgcttgctcggcctgcgatctggtcaacgtggacctggatgactgtgtttctgagcaataaatgacttaaaccaggtatggctgccgatggttatcttccagattggctcgaggacaacctctctgagggcattcgcgagtggtgggcgctgaaacctggagccccgaagcccaaagccaaccagcaaaagcaggacgacggccggggtctggtgcttcctggctacaagtacctcggacccttcaacggactcgacaagggggagcccgtcaacgcggcggacgcagcggccctcgagcacgacaaggcttacgaccagcagctgcaggcgggtgacaatccgtacctgcggtataaccacgccgacgccgagtttcaggagcgtctgcaagaagatacgtcttttgggggcaacctcgggcgagcagtcttccaggccaagaagcgggttctcgaacctctcggtctggttgaggaaggcgctaagacggctcctggaaagaagagaccggtagagccatcaccccagcgttctccagactcctctacgggcatcggcaagaaaggccaacagcccgccagaaaaagactcaattttggtcagactggcgactcagagtcagttccagaccctcaacctctcggagaacctccagcagcgccctctggtgtgggacctaatacaatggctgcaggcggtggcgcaccaatggcagacaataacgaaggcgccgacggagtgggtagttcctcgggaaattggcattgcgattccacatggctgggcgacagagtcatcaccaccagcacccgaacctgggccctgcccacctacaacaaccacctctacaagcaaatctccaacgggacatcgggaggagccaccaacgacaacacctacttcggctacagcaccccctgggggtattttgactttaacagattccactgccacctttcaccacgtgactggcagcgactcatcaacaacaactggggattccgacccaagagactcagcttcaagctcttcaacatccaggtcaaggaggtcacgcagaatgaaggcaccaagaccatcgccaataacctcaccagcaccatccaggtgtttacggactcggagtaccagctgccgtacgttctcggctctgtccaccagggctgcctgcctccgttcccggcggacgtgttcatgattccccagtacggctacctaacactcaacaacggtagtcaggccgtgggacgctcctccttctactgcctggaatactttccttcgcagatgctgagaaccggcaacaacttccagtttacttacaccttcgaggacgtgcctttccacagcagctacgcccacagctagagcttggaccggctgatgaatcctctgattgaccagtacctgtactacttgtctcggactcaaacaacaggaggcacggcaaatacgcagactctgggcttcagccaaggtgggcctaatacaatggccaatcaggcaaagaactggctgccaggaccctgttaccgccaacaacgcgtctcaacgacaaccgggcaaaacaacaatagcaactttgcctggactgctgggaccaaataccatctgaatggaagaaattcattggctaatcctggcatcgctatggcaacacacaaagacgacgaggagcgtttttttcccagtaacgggatcctgatttttggcaaacaaaatgctgccagagacaatgcggattacagcgatgtcatgctcaccagcgaggaagaaatcaaaaccactaaccctgtggctacagaggaatacggtatcgtggcagataacttgcagcagcaaaacacggctcctcaaattggaactgtcaacagccagggggccttacccggtatggtctggcagaaccgggacgtgtacctgcagggtcccatctgggccaagattcctcacacggacggcaacttccacccgtctccgctgatgggcggctttggcctgaaacatcctccgcctcagatcctgatcaagaacacgcctgtacctgcggatcctccgaccaccttcaaccagtcaaagctgaactctttcatcacgcaatacagcaccggacaggtcagcgtggaaattgaatgggagctgcagaaggaaaacagcaagcgctggaaccccgagatccagtacacctccaactactacaaatctataagtgtggactttgctgttaatacagaaggcgtgtactctgaaccccgccccattggcacccgttacctcacccgtaatctgtaattgcctgttaatcaataaaccggttgattcgtttcagttgaactttggtctctgcgaagggcgaattc

SEQ ID NO: 16 - DNA, 255 bp, Adeno-associated virus 10
ggtaattcctccggaaattggcattgcgattccacatggctgggcgacagagtcatcaccaccagcacccgaacctgggtcctgcccacctacaacaaccacatctacaagcaaatctccagcgagacaggagccaccaacgacaaccactacttcggctacagcaccccctgggggtattttgactttaacagattccactgccacttttcaccacgtgactggcagcgactcatcaacaacaactggggattc

SEQ ID NO: 17 - protein, 738 aa, Adeno-associated virus 10
MAADGYLPDWLEDNLSEGIREWWDLKPGAPKPKANQQKQDDGRGLVLPGYKYLGPFNGLDKGEPVNAADAAALEHDKAYDQQLKAGDNPYLRYNHADAEFQERLQEDTSFGGNLGRAVFQAKKRVLEPLGLVEEAAKTAPGKKRPVEPSPQRSPDSSTGIGKKGQQPAKKRLNFGQTGESESVPDPQPIGEPPAGPSGLGSGTMAAGGGAPMADNNEGADGVGSSSGNWHCDSTWLGDRVITTSTRTWALPTYNNHLYKQISNGTSGGSTNDNTYFGYSTPWGYFDFNRFHCHFSPRDWQRLINNNWGFRPKRLSFKLFNIQVKEVTQNEGTKTIANNLTSTIQVFTDSEYQLPYVLGSAHQGCLPPFPADVFMIPQYGYLTLNNGSQAVGRSSFYCLEYFPSQMLRTGNNFEFSYTFEDVPFHSSYAHSQSLDRLMNPLIDQYLYYLSRTQSTGGTQGTQQLLFSQAGPANMSAQAKNWLPGPCYRQQRVSTTLSQNNNSNFAWTGATKYHLNGRDSLVNPGVAMATHKDDEERFFPSSGVLMFGKQGAGRDNVDYSSVMLTSEEEIKTTNPVATEQYGVVADNLQQANTGPIVGNVNSQGALPGMVWQNRDVYLQGPIWAKIPHTDGNFHPSPLMGGFGLKHPPPQILIKNTPVPADPPTTFSQAKLASFITQYSTGQVSVEIEWELQKENSKRWNPEIQYTSNYYKSTNVDFAVNTEGTYSEPRPIGTRYLTRNL

SEQ ID NO: 18 - protein, 738 aa, Adeno-associated virus 10
MAADGYLPDWLEDNLSEGIREWWDLKPGAPKPKANQQKQDDGRGLVLPGYKYLGPFNGLDKGEPVNAADAAALEHDKAYDQQLKAGDNPYLRYNHADAEFQERLQEDTSFGGNLGRAVFQAKKRVLEPLGLVEEGAKTAPGKKRPVEPSPQRSPDSSTGIGKKGQQPAKKRLNFGQTGDSESVPDPQPIGEPPAGPSGLGSGTMAAGGGAPMADNNEGADGVGSSSGNWHCDSTWLGDRVITTSTRTWALPTYNNHLYKQISNGTSGGSTNDNTYFGYSTPWGYFDFNRFHCHFSPRDWQRLINNNWGFRPKRLNFKLFNIQVKEVTQNEGTKTIANNLTSTIQVFTDSEYQLPYVLGSAHQGCLPPFPADVFMIPQYGYLTLNNGSQAVGRSSFYCLEYFPSQMLRTGNNFEFSYQFEDVPFHSSYAHSQSLDRLMNPLIDQYLYYLSRTQSTGGTAGTQQLLFSQAGPNNMSAQAKNWLPGPCYRQQRVSTTLSQNNNSNFAWTGATKYHLNGRDSLVNPGVAMATHKDDEERFFPSSGVLMFGKQGAGKDNVDYSSVMLTSEEEIKTTNPVATEQYGVVADNLQQQNAAPIVGAVNSQGALPGMVWQNRDVYLQGPIWAKIPHTDGNFHPSPLMGGFGLKHPPPQILIKNTPVPADPPTTFSQAKLASFITQYSTGQVSVEIEWELQKENSKRWNPEIQYTSNYYKSTNVDFAVNTDGTYSEPRPIGTRYLTRNL

SEQ ID NO: 19 - DNA, 258 bp, Adeno-associated virus 11
ggtaattcctccggaaattggcattgcgattccacatggctgggcgacagagtcatcaccaccagcacccgaacctgggccctgccaacctacaacaaccacctctacaaacaaatctccagcgcttcaacgggggccagcaacgacaaccactactttggctacagcaccccctgggggtattttgactttaacagattccactgccacttctcaccacgtgactggcagcgactcatcaacaacaactggggattc

SEQ ID NO: 20 - DNA, 255 bp, Adeno-associated virus 12
ggtaattcctccggaaattggcattgcgattccacatggctgggcgaccgagtcattaccaccagcacccggacttgggccctgcccacctacaacaaccacctctacaagcaaatctccagccaatcgggtgccaccaacgacaaccactacttcggctacagcaccccttgggggtattttgatttcaacagattccactgccatttctcaccacgtgactggcagcgactcatcaacaacaactggggattc

SEQ ID NO: 21 - DNA, 2208 bp, Adeno-associated virus 2
atggctgccgatggttatcttccagattggctcgaggacactctctctgaaggaataagacagtggtggaagctcaaacctggcccaccaccaccaaagcccgcagagcggcataaggacgacagcaggggtcttgtgcttcctgggtacaagtacctcggacccttcaacggactcgacaagggagagccggtcaacgaggcagacgccgcggccctcgagcacgacaaagcctacgaccggcagctcgacagcggagacaacccgtacctcaagtacaaccacgccgacgcggagtttcaggagcgccttaaagaagatacgtcttttgggggcaacctcggacgagcagtcttccaggcgaaaaagagggttcttgaacctctgggcctggttgaggaacctgttaagacggctccgggaaaaaagaggccggtagagcactctcctgtggagccagactcctcctcgggaaccggaaaggcgggccagcagcctgcaagaaaaagattgaattttggtcagactggagacgcagactcagtacctgacccccagcctctcggacagccaccagcagccccctctggtctgggaactaatacgatggctacaggcagtggcgcaccaatggcagacaataacgagggcgccgacggagtgggtaattcctcgggaaattggcattgcgattccacatggatgggcgacagagtcatcaccaccagcacccgaacctgggccctgcccacctacaacaaccacctctacaaacaaatttccagccaatcaggagcctcgaacgacaatcactactttggctacagcaccccttgggggtattttgacttcaacagattccactgccacttttcaccacgtgactggcaaagactcatcaacaacaactggggattccgacccaagagactcaacttcaagctctttaacattcaagtcaaagaggtcacgcagaatgacggtacgacgacgattgccaataaccttaccagcacggttcaggtgtttactgactcggagtaccagctcccgtacgtcctcggctcggcgcatcaaggatgcctcccgccgttcccagcagacgtcttcatggtgccacagtatggatacctcaccctgaacaacgggagtcaggcagtaggacgctcttcattttactgcctggagtactttccttctcagatgctgcgtaccggaaacaactttaccttcagctacacttttgaggacgttcctttccacagcagctacgctcacagccagagtctggaccgtctcatgaatcctctcatcgaccagtacctgtattacttgagcagaacaaacactccaagtggaaccaccacgcagtcaaggcttcagttttctcaggccggagcgagtgacattcgggaccagtctaggaactggcttcctggaccctgttaccgccagcagcgagtatcaaagacatctgcggataacaacaacagtgaatactcgtggactggagctaccaagtaccacctcaatggcagagactctctggtgaatccgggcccggccatggcaagccacaaggacgatgaagaaaagttttttcctcagagcggggttctcatctttgggaagcaaggctcagagaaaacaaatgtggacattgaaaaggtcatgattacagacgaagaggaaatcaggacaaccaatcccgtggctacggagcagtatggttctgtatctaccaacctccagagaggcaacagacaagcagctaccgcagatgtcaacacacaaggcgttcttccaggcatggtctggcaggacagagatgtgtaccttcaggggcccatctgggcaaagattccacacacggacggacattttcacccctctcccctcatgggtggattcggacttaaacaccctcctccacagattctcatcaagaacaccccggtacctgcgaatccttcgaccaccttcagtgcggcaaagtttgcttccttcatcacacagtactccacgggacaggtcagcgtggagatcgagtgggagctgcagaaggaaaacagcaaacgctggaatcccgaaattcagtacacttccaactacaacaagtctgttaatgtggactttactgtggacactaatggcgtgtattcagagcctcgccccattggcaccagatacctgactcgtaatctgtaa

SEQ ID NO: 22 - protein, 735 aa, Adeno-associated virus 2 [sequence omitted]

SEQ ID NO: 23 - protein, 621 aa, Adeno-associated virus 2
MPGFYEIVIKVPSDLDGHLPGISDSFVNWVAEKEWELPPDSDMDLNLIEQAPLTVAEKLQRDFLTEWRRVSKAPEALFFVQFEKGESYFHMHVLVETTGVKSMVLGRFLSQIREKLIQRIYRGIEPTLPNWFAVTKTRNGAGGGNKVVDECYIPNYLLPKTQPELQWAWTNMEQYLSACLNLTERKRLVAQHLTHVSQTQEQNKENQNPNSDAPVIRSKTSARYMELVGWLVDKGITSEKQWIQEDQASYISFNAASNSRSQIKAALDNAGKIMSLTKTAPDYLVGQQPVEDISSNRIYKILELNGYDPQYAASVFLGWATKKFGKRNTIWLFGPATTGKTNIAEAIAHTVPFYGCVNWTNENFPFNDCVDKMVIWWEEGKMTAKVVESAKAILGGSKVRVDQKCKSSAQIDPTPVIVTSNTNMCAVIDGNSTTFEHQQPLQDRMFKFELTRRLDHDFGKVTKQEVKDFFRWAKDHVVEVEHEFYVKKGGAKKRPAPSDADISEPKRVRESVAQPSTSDAEASINYADRYQNKCSRHVGMNLMLFPCRQCERMNQNSNICFTHGQKDCLECFPVSESQPVSVVKKAYQKLCYIHHIMGKVPDACTACDLVNVDLDDCIFEQ

SEQ ID NO: 24 - DNA, 4675 bp, Adeno-associated virus 2
ttggccactccctctctgcgcgctcgctcgctcactgaggccgggcgaccaaaggtcgcccgacgcccgggctttgcccgggcggcctcagtgagcgagcgagcgcgcagagagggagtggccaactccatcactaggggttcctggaggggtggagtcgtgacgtgaattacgtcatagggttagggaggtcctgtattagaggtcacgtgagtgttttgcgacattttgcgacaccatgtggtcacgctgggtatttaagcccgagtgagcacgcagggtctccattttgaagcgggaggtttgaacgcgcagccgccatgccggggttttacgagattgtgattaaggtccccagcgaccttgacgggcatctgcccggcatttctgacagctttgtgaactgggtggccgagaaggaatgggagttgccgccagattctgacatggatctgaatctgattgagcaggcacccctgaccgtggccgagaagctgcagcgcgactttctgacggaatggcgccgtgtgagtaaggccccggaggcccttttctttgtgcaatttgagaagggagagagctacttccacatgcacgtgctcgtggaaaccaccggggtgaaatccatggttttgggacgtttcctgagtcagattcgcgaaaaactgattcagagaatttaccgcgggatcgagccgactttgccaaactggttcgcggtcacaaagaccagaaatggcgccggaggcgggaacaaggtggtggatgagtgctacatccccaattacttgctccccaaaacccagcctgagctccagtgggcgtggactaatatggaacagtatttaagcgcctgtttgaatctcacggagcgtaaacggttggtggcgcagcatctgacgcacgtgtcgcagacgcaggagcagaacaaagagaatcagaatcccaattctgatgcgccggtgatcagatcaaaaacttcagccaggtacatggagctggtcgggtggctcgtggacaaggggattacctcggagaagcagtggatccaggaggaccaggcctcatacatctccttcaatgcggcctccaactcgcggtcccaaatcaaggctgccttggacaatgcgggaaagattatgagcctgactaaaaccgcccccgactacctggtgggccagcagcccgtggaggacatttccagcaatcggatttataaaattttggaactaaacgggtacgatccccaatatgcggcttccgtctttctgggatgggccacgaaaaagttcggcaagaggaacaccatctggctgtttgggcctgcaactaccgggaagaccaacatcgcggaggccatagcccacactgtgcccttctacgggtgcgtaaactggaccaatgagaactttcccttcaacgactgtgtcgacaagatggtgatctggtgggaggaggggaagatgaccgccaaggtcgtggagtcggccaaagccattctcggaggaagcaaggtgcgcgtggaccagaaatgcaagtcctcggcccagatagacccgactcccgtgatcgtcacctccaacaccaacatgtgcgccgtgattgacgggaactcaacgaccttcgaacaccagcagccgttgcaagaccggatgttcaaatttgaactcacccgccgtctggatcatgactttgggaaggtcaccaagcaggaagtcaaagactttttccggtgggcaaaggatcacgtggttgaggtggagcatgaattctacgtcaaaaagggtggagccaagaaaagacccgcccccagtgacgcagatataagtgagcccaaacgggtgcgcgagtcagttgcgcagccatcgacgtcagacgcggaagcttcgatcaactacgcagacaggtaccaaaacaaatgttctcgtcacgtgggcatgaatctgatgctgtttccctgcagacaatgcgagagaatgaatcagaattcaaatatctgcttcactcacggacagaaagactgtttagagtgctttcccgtgtcagaatctcaacccgtttctgtcgtcaaaaaggcgtatcagaaactgtgctacattcatcatatcatgggaaaggtgccagacgcttgcactgcctgcgatctggtcaatgtggatttggatgactgcatctttgaacaataaatgatttaaatcaggtatggctgccgatggttatcttccagattggctcgaggacactctctctgaaggaataagacagtggtggaagctcaaacctggcccaccaccaccaaagcccgcagagcggcataaggacgacagcaggggtcttgtgcttcctgggtacaagtacctcggacccttcaacggactcgacaagggagagccggtcaacgaggcagacgccgcggccctcgagcacgtacaaagcctacgaccggcagctcgacagcggagacaacccgtacctcaagtacaaccacgccgacgcggagtttcaggagcgccttaaagaagatacgtcttttgggggcaacctcggacgagcagtcttccaggcgaaaaagagggttcttgaacctctgggcctggttgaggaacctgttaagacggctccgggaaaaaagaggccggtagagcactctcctgtggagccagactcctcctcgggaaccggaaaggcgggccagcagcctgcaagaaaaagattgaattttggtcagactggagacgcagactcagtacctgacccccagcctctcggacagccaccagcagccccctctggtctgggaactaatacgatggctacaggcagtggcgcaccaatggcagacaataacgagggcgccgacggagtgggtaattcctccggaaattggcattgcgattccacatggatgggcgacagagtcatcaccaccagcacccgaacctgggccctgcccacctacaacaaccacctctacaaacaaatttccagccaatcaggagcctcgaacgacaatcactactttggctacagcaccccttgggggtattttgacttcaacagattccactgccacttttcaccacgtgactggcaaagactcatcaacaacaactggggattccgacccaagagactcaacttcaagctctttaacattcaagtcaaagaggtcacgcagaatgacggtacgacgacgattgccaataaccttaccagcacggttcaggtgtttactgactcggagtaccagctcccgtacgtcctcggctcggcgcatcaaggatgcctcccgccgttcccagcagacgtcttcatggtgccacagtatggatacctcaccctgaacaacgggagtcaggcagtaggacgctcttcattttactgcctggagtactttccttctcagatgctgcgtaccggaaacaactttaccttcagctacacttttgaggacgttcctttccacagcagctacgctcacagccagagtctggaccgtctcatgaatcctctcatcgaccagtacctgtattacttgagcagaacaaacactccaagtggaaccaccacgcagtcaaggcttcagttttctcaggccggagcgagtgacattcgggaccagtctaggaactggcttcctggaccctgttaccgccagcagcgagtatcaaagacatctgcggataacaacaacagtgaatactcgtggactggagctaccaagtaccacctcaatggcagagactctctggtgaatccggccatggcaagccacaaggacgatgaagaaaagttttttcctcagagcggggttctcatctttgggaagcaaggctcagagaaaacaaatgtgaacattgaaaaggtcatgattacagacgaagaggaaatcggaacaaccaatcccgtggctacggagcagtatggttctgtatctaccaacctccagagaggcaacagacaagcagctaccgcagatgtcaacacacaaggcgttcttccaggcatggtctggcaggacagagatgtgtaccttcaggggcccatctgggcaaagattccacacacggacggacattttcacccctctcccctcatgggtggattcggacttaaacaccctcctccacagattctcatcaagaacaccccggtacctgcgaatccttcgaccaccttcagtgcggcaaagtttgcttccttcatcacacagtactccacgggacacggtcagcgtggagatcgagtgggagctgcagaaggaaaacagcaaacgctggaatcccgaaattcagtacacttccaactacaacaagtctgttaatcgtggacttaccgtggatactaatggcgtgtattcagagcctcgccccattggcaccagatacctgactcgtaatctgtaattgcttgttaatcaataaaccgtttaattcgtttcagttgaactttggtctctgcgtatttctttcttatctagtttccatggctacgtagataagtagcatggcgggttaatcattaactacaaggaacccctagtgatggagttggccactccctctctgcgcgctcgctcgctcactgaggccgggcgaccaaaggtcgcccgacgcccgggctttgcccgggcggcctcagtgagcgagcgagcgcgcagagagggagtggccaa

SEQ ID NO: 25 - DNA, 4679 bp, Adeno-associated virus 2
ttggccactccctctctgcgcgctcgctcgctcactgaggccgggcgaccaaaggtcgcccgacgcccgggctttgcccgggcggcctcagtgagcgagcgagcgcgcagagagggagtggccaactccatcactaggggttcctggaggggtggagtcgtgacgtgaattacgtcatagggttagggaggtcctgtattagaggtcacgtgagtgttttgcgacattttgcgacaccatgtggtcacgctgggtatttaagcccgagtgagcacgcagggtctccattttgaagcgggaggtttgaacgcgcagccgccatgccggggttttacgagattgtgattaaggtccccagcgaccttgacgggcatctgcccggcatttctgacagctttgtgaactgggtggccgagaaggaatgggagttgccgccagattctgacatggatctgaatctgattgagcaggcacccctgaccgtggccgagaagctgcagcgcgactttctgacggaatggcgccgtgtgagtaaggccccggaggcccttttctttgtgcaatttgagaagggagagagctacttccacatgcacgtgctcgtggaaaccaccggggtgaaatccatggttttgggacgtttcctgagtcagattcgcgaaaaactgattcagagaatttaccgcgggatcgagccgactttgccaaactggttcgcggtcacaaagaccagaaatggcgccggaggcgggaacaaggtggtggatgagtgctacatccccaattacttgctccccaaaacccagcctgagctccagtgggcgtggactaatatggaacagtatttaagcgcctgtttgaatctcacggagcgtaaacggttggtggcgcagcatctgacgcacgtgtcgcagacgcaggagcagaacaaagagaatcagaatcccaattctgatgcgccggtgatcagatcaaaaacttcagccaggtacatggagctggtcgggtggctcgtggacaaggggattacctcggagaagcagtggatccaggaggaccaggcctcatacatctccttcaatgcggcctccaactcgcggtcccaaatcaaggctgccttggacaatgcgggaaagattatgagcctgactaaaaccgcccccgactacctggtgggccagcagcccgtggaggacatttccagcaatcggatttataaaattttggaactaaacgggtacgatccccaatatgcggcttccgtctttctgggatgggccacgaaaaagttcggcaagaggaacaccatctggctgtttgggcctgcaactaccgggaagaccaacatcgcggaggccatagcccacactgtgcccttctacgggtgcgtaaactggaccaatgagaactttcccttcaacgactgtgtcgacaagatggtgatctggtgggaggaggggaagatgaccgccaaggtcgtggagtcggccaaagccattctcggaggaagcaaggtgcgcgtggaccagaaatgcaagtcctcggcccagatagacccgactcccgtgatcgtcacctccaacaccaacatgtgcgccgtgattgacgggaactcaacgaccttcgaacaccagcagccgttgcaagaccggatgttcaaatttgaactcacccgccgtctggatcatgactttgggaaggtcaccaagcaggaagtcaaagactttttccggtgggcaaaggatcacgtggttgaggtggagcatgaattctacgtcaaaaagggtggagccaagaaaagacccgcccccagtgacgcagatataagtgagcccaaacgggtgcgcgagtcagttgcgcagccatcgacgtcagacgcggaagcttcgatcaactacgcagacaggtaccaaaacaaatgttctcgtcacgtgggcatgaatctgatgctgtttccctgcagacaatgcgagagaatgaatcagaattcaaatatctgcttcactcacggacagaaagactgtttagagtgctttcccgtgtcagaatctcaacccgtttctgtcgtcaaaaaggcgtatcagaaactgtgctacattcatcatatcatgggaaaggtgccagacgcttgcactgcctgcgatctggtcaatgtggatttggatgactgcatctttgaacaataaatgatttaaatcaggtatggctgccgatggttatcttccagattggctcgaggacactctctctgaaggaataagacagtggtggaagctcaaacctggcccaccaccaccaaagcccgcagagcggcataaggacgacagcaggggtcttgtgcttcctgggtacaagtacctcggacccttcaacggactcgacaagggagagccggtcaacgaggcagacgccgcggccctcgagcacgacaaagcctacgaccggcagctcgacagcggagacaacccgtacctcaagtacaaccacgccgacgcggagtttcaggagcgccttaaagaagatacgtcttttgggggcaacctcggacgagcagtcttccaggcgaaaaagagggttcttgaacctctgggcctggttgaggaacctgttaagacggctccgggaaaaaagaggccggtagagcactctcctgtggagccagactcctcctcgggaaccggaaaggcgggccagcagcctgcaagaaaaagattgaattttggtcagactggagacgcagactcagtacctgacccccagcctctcggacagccaccagcagccccctctggtctgggaactaatacgatggctacaggcagtggcgcaccaatggcagacaataacgagggcgccgacggagtgggtaattcctccggaaattggcattgcgattccacatggatgggcgacagagtcatcaccaccagcacccgaacctgggccctgcccacctacaacaaccacctctacaaacaaatttccagccaatcaggagcctcgaacgacaatcactactttggctacagcaccccttgggggtattttgacttcaacagattccactgccacttttcaccacgtgactggcaaagactcatcaacaacaactggggattccgacccaagagactcaacttcaagctctttaacattcaagtcaaagaggtcacgcagaatgacggtacgacgacgattgccaataaccttaccagcacggttcaggtgtttactgactcggagtaccagctcccgtacgtcctcggctcggcgcatcaaggatgcctcccgccgttcccagcagacgtcttcatggtgccacagtatggatacctcaccctgaacaacgggagtcaggcagtaggacgctcttcattttactgcctggagtactttccttctcagatgctgcgtaccggaaacaactttaccttcagctacacttttgaggacgttcctttccacagcagctacgctcacagccagagtctggaccgtctcatgaatcctctcatcgaccagtacctgtattacttgagcagaacaaacactccaagtggaaccaccacgcagtcaaggcttcagttttctcaggccggagcgagtgacattcgggaccagtctaggaactggcttcctggaccctgttaccgccagcagcgagtatcaaagacatctgcggataacaacaacagtgaatactcgtggactggagctaccaagtaccacctcaatggcagagactctctggtgaatccgggcccggccatggcaagccacaaggacgatgaagaaaagttttttcctcagagcggggttctcatctttgggaagcaaggctcagagaaaacaaatgtggacattgaaaaggtcatgattacagacgaagaggaaatcaggacaaccaatcccgtggctacggagcagtatggttctgtatctaccaacctccagagaggcaacagacaagcagctaccgcagatgtcaacacacaaggcgttcttccaggcatggtctggcaggacagagatgtgtaccttcaggggcccatctgggcaaagattccacacacggacggacattttcacccctctcccctcatgggtggattcggacttaaacaccctcctccacagattctcatcaagaacaccccggtacctgcgaatccttcgaccaccttcagtgcggcaaagtttgcttccttcatcacacagtactccacgggacaggtcagcgtggagatcgagtgggagctgcagaaggaaaacagcaaacgctggaatcccgaaattcagtacacttccaactacaacaagtctgttaatgtggactttactgtggacactaatggcgtgtattcagagcctcgccccattggcaccagatacctgactcgtaatctgtaattgcttgttaatcaataaaccgtttaattcgtttcagttgaactttggtctctgcgtatttctttcttatctagtttccatggctacgtagataagtagcatggcgggttaatcattaactacaaggaacccctagtgatggagttggccactccctctctgcgcgctcgctcgctcactgaggccgggcgaccaaaggtcgcccgacgcccgggctttgcccgggcggcctcagtgagcgagcgagcgcgcagagagggagtggccaa

SEQ ID NO: 26 - protein, 725 aa, Adeno-associated virus 5
MAADGYLPDWLEDTLSEGIRQWWKLKPGPPPPKPAERHKDDSRGLVLPGYKYLGPFNGLDKGEPVNEADAAALEHDKAYDRQLDSGDNPYLKYNHADAEFQERLKEDTSFGGNLGRAVFQAKKRVLEPFGLVEEGAKTAPTGKRIDDHFPKRKKARTEEDSKPSTSSDAEAGPSGSQQLQIPAQPASSLGADTMSAGGGGPLGDNNQGADGVGNASGDWHCDSTWMGDRVVTKSTRTWVLPSYNNHQYREIKSGSVDGSNANAYFGYSTPWGYFDFNRFHSHWSPRDWQRLINNYWGFRPRSLRVKIFNIQVKEVTVQDSTTTIANNLTSTVQVFTDDDYQLPYVVGNGTEGCLPAFPPQVFTLPQYGYATLNRDNTENPTERSSFFCLEYFPSKMLRTGNNFEFTYNFEEVPFHSSFAPSQNLFKLANPLVDQYLYRFVSTNNTGGVQFNKNLAGRYANTYKNWFPGPMGRTQGWNLGSGVNRASVSAFATTNRMELEGASYQVPPQPNGMTNNLQGSNTYALENTMIFNSQPANPGTTATYLEGNMLITSESETQPVNRVAYNVGGQMATNNQSSTTAPTTGTYNLQEIVPGSVWMERDVYLQGPIWAKIPETGAHFHPSPAMGGFGLKHPPPMMLIKNTPVPGNITSFSDVPVSSFITQYSTGQVTVEMEWELKKENSKRWNPEIQYTNNYNDPQFVDFAPDSTGEYRTTRPIGTRYLTRPL

SEQ ID NO: 27 - protein, 644 aa, Artificial Sequence
  source: /note="Description of Artificial Sequence: Synthetic polypeptide"
  MOD_RES (434)..(434): Any amino acid
KAYDQQLKAGDNPYLRYNHADAEFQERLQEDTSFGGNLGRAVFQAKKRVLEPLGLVETPAKTAPGKKRPVDSPDSTSGIGKKGQQPAKKRLNFGQTGDSESVPDPQPIGEPPAGPSGLGSGTMAAGGGAPMADNNEGADGVGNASGNWHCDSTWLGDRVITTSTRTWALPTYNNHLYKQISSQSAGSTNDNVYFGYSTPWGYFDFNRFHCHFSPRDWQRLINNNWGFRPKKLNFKLFNIQVKEVTTNDGVTTIANNLTSTVQVFSDSEYQLPYVLGSAHQGCLPPFPADVFMIPQYGYLTLNNGSQSVGRSSFYCLEYFPSQMLRTGNNFTFSYTFEDVPFHSSYAHSQSLDRLMNPLIDQYLYYLARTQSNAGGTAGNRELQFYQGGPTTMAEQAKNWLPGPCFRQQRVSKTLDQNNNSNFAWTGATKYHLNXRNSLVNPGVAMATHKDDEERFFPSSGVLIFGKTGAANKTTLENVLMTNEEEIRPTNPVATEEYGIVSSNLQAASTAAQTQVVNNQGALPGMVWQNRDVYLQGPIWAKIPHTDGNFHPSPLMGGFGLKHPPPQILIKNTPVPANPPEVFTPAKFASFITQYSTGQVSVEIEWELQKENSKRWNPEIQYTSNFDKQTGVDFAVDSQGVYSEP

SEQ ID NO: 28 - DNA, 1933 bp, Artificial Sequence
  source: /note="Description of Artificial Sequence: Synthetic polynucleotide"
caaggcctacgaccagcagctcaaagcgggtgacaatccgtacctgcggtataaccacgccgacgccgagtttcaggagtgtcttcaagaagatacgtcttttgggggcaacctcgggcgagcagtcttccaggccaaaaagcgggttctcgaacctcttggtctggttgagacgccagctaagacggcacctggaaagaagcgaccggtagactcgccagactccacctcgggcatcggcaagaaaggccagcagcccgcgaaaaagagactcaactttgggcagactggcgactcagagtcagtccccgaccctcaaccaatcggagaaccaccagcaggcccctctggtctgggatctggtacaatggttgcaggcggtggcgcaccaatggctgacaataacgagggcgccgacggagtgggtaatgcctcaggaaattggcattgcgattccacatggctgggcgacagagtcatcaccaccagcacccgaacctgggccctgcccacctacaacaaccacctctacaagcaaatctccagtcagtcagcagggagcaccaacgataacgtctatttcggctacagcaccccctgggggtattttgacttcaacagattccattgccacttctcaccacgtgactggcagcgacttatcaacaacaactggggattccggcccaagaagctcaacttcaagctcttcaacatccaggtcaaggaggtcacgacgaatgacggtgtcacaaccatcgctaataaccttaccagcacggttcaggtcttttcggactcggaatatcaactgccgtacgtcctcggctccgcgcaccagggctgcctgcctccgttcccggcagacgtgttcatgattccgcagtacggatacctgactctgaacaatggcagccaatcggtaggccgttcctccttctactgcctggagtactttccttctcagatgctgagaacgggcaacaacttcacctttagctacaccttcgaggacgtgcctttccacagcagctacgcgcacagccagagtctggaccggctgatgaatcccctcatcgaccagtacctgtactacttggccagaacacagagcaacgcaggaggtactgctggcaatcgggaactgcagttttatcagggcggacctaccaccatggccgaacaagcaaagaactggctgcccggaccttgcttccggcaacagagagtatccaagacgctggatcaaaataacaacagcaactttgcctggactggtgccacaaaataccatttaaatggaagaaattcattggttaatcccggtgtcgccatggcaacccacaaggacgacgaggaacgcttctccccttcgagcggagttctaatttttggcaaaactggagcagctaataaaactacattagaaaacgtgctcatgacaaatgaagaagaaattcgtcctaccaacccggtagctaccgaggaatacgggattgtaagcagcaacttgcaggcggctagcaccgcagcccagacacaagttgttaacaaccagggagccttacctggcatggtctggcagaaccgggacgtgtacctgcaaggtcccatttgggccaagattcctcacacggacggcaactttcacccgtctcctctaatgggtggctttggactgaaacacccgcctccccagatcctgatcaaaaacacgccggtacctgctaatcctccagaagtgtttactcctgccaagtttgcttccttcatcacgcagtacagcaccgggcaagtcagcgttgagatcgagtgggagctgcagaaagagaacagcaagcgctggaacccagagattcagtacacctccaactttgacaaacagactggagtggactttgctgttgacagccagggtgtttactctgagcct

SEQ ID NO: 29 - protein, 644 aa, Artificial Sequence
  source: /note="Description of Artificial Sequence: Synthetic polypeptide"
KAYDQQLKAGDNPYLRYNHADAEFQECLQEDTSFGGNLGRAVFQAKKRVLEPLGLVETPAKTAPGKKRPVDSPDSTSGIGKKGQQPAKKRLNFGQTGDSESVPDPQPIGEPPAGPSGLGSGTMVAGGGAPMADNNEGADGVGNASGNWHCDSTWLGDRVITTSTRTWALPTYNNHLYKQISSQSAGSTNDNVYFGYSTPWGYFDFNRFHCHFSPRDWQRLINNNWGFRPKKLNFKLFNIQVKEVTTNDGVTTIANNLTSTVQVFSDSEYQLPYVLGSAHQGCLPPFPADVFMIPQYGYLTLNNGSQSVGRSSFYCLEYFPSQMLRTGNNFTFSYTFEDVPFHSSYAHSQSLDRLMNPLIDQYLYYLARTQSNAGGTAGNRELQFYQGGPTTMAEQAKNWLPGPCFRQQRVSKTLDQNNNSNFAWTGATKYHLNGRNSLVNPGVAMATHKDDEERFSPSSGVLIFGKTGAANKTTLENVLMTNEEEIRPTNPVATEEYGIVSSNLQAASTAAQTQVVNNQGALPGMVWQNRDVYLQGPIWAKIPHTDGNFHPSPLMGGFGLKHPPPQILIKNTPVPANPPEVFTPAKFASFITQYSTGQVSVEIEWELQKENSKRWNPEIQYTSNFDKQTGVDFAVDSQGVYSEP

SEQ ID NO: 30 - DNA, 1933 bp, Artificial Sequence
  source: /note="Description of Artificial Sequence: Synthetic polynucleotide"
caaggcctacgaccagcagctcaaagcgggtgacaatccgtacctgcggtataaccacgccgacgccgagtttcaggagcgtcttcaagaagatacgtcttttgggggcaacctcgggcgagcagtcttccaggccaaaaagcgggttctcgaacctcttggtctggttgagacgccagctaagacggcacctggaaagaagcgaccggtagactcgccagactccacctcgggcatcggcaagaaaggccagcagcccgcgaaaaagagactcaactttgggcagactggcgactcagagccagtccccgaccctcaaccaatcggagaaccaccagcaggcccctctggtctgggatctggtacaatggctgcaggcggtggcgcaccaatggctgacaataacgagggcgccgacggagtgggtaatgcctcaggaaattggcattgcgattccacacggctgggcgacagagtcatcaccaccagcacccgaacctgggccctgcccacctacaacaaccacctctacaagcaaatctccagtcagtcagcagggagcaccaacgataacgtctatttcggctacagcaccccctgggggtattttgacttcaacagattccattgccacttctcaccacgtgactggcagcgacttatcaacaacaactggggattccggcccaagaagctcaacttcaagctcttcaacatccaggtcaaggaggtcacgacgaatgacggcgtcacaaccatcgctaataaccttaccagcacggttcaggtcttttcggactcggaatatcaactgccgtacgtcctcggctccgcgcaccagggctgcctgcctccgttcccggcagacgtgttcatgattccgcagtacggatacctgactctgaacaatggcagccaatcggtaggccgttcctccttctactgcctggagtactttccttctcagatgctgagaacgggcaacaacttcacctttagctacaccttcgaggacgtgcctttccacagcagctacgcgcacagccagagtctgggccggctgatgaatcccctcatcgaccagtacctgtactacttggccagaacacagagcaacgcaggaggtactgctggcaatcgggaactgcagttttatcagggcggacctaccaccatggccgaacaagcaaagaactggctgcccggaccttgcttccggcaacagagagtatccaagacgctggatcaaaataacaacagcaactttgcctggactggtgccacaaaataccatttaaatggaagaaattcattggttaatcccggtgtcgccatggcaacccacaaggacgacgaggaacgcttcttcccttcgagcggagttctaatttttggcaaaactggagcagctaataaaactacattagaaaacgtgctcatgacaaatgaagaagaaattcgtcctaccaacccggtagctaccgaggaatacgggattgtaagcagcaacttgcaggcggctagcaccgcagcccagacacaagttgttaacaaccagggagccttacctggcatggtctggcagaaccgggacgtgtacctgcaaggtcccatttgggccaagattcctcacacggacggcaactttcacccgtctcctctaatgggtggctttggactgaaacacccgcctccccagatcctgatcaaaaacacaccggtacctgctaatcctccagaagtgtttactcctgccaagtttgcttccttcatcacgcagtacagcaccgggcaagtcagcgttgagatcgaatgggagctgcagaaagagaacagcaagcgctggaacccagagattcagtacacctccaactttgacaaacagactggagtggactttgctgttgacagccagggtgtttactctgagcct

SEQ ID NO: 31 - protein, 644 aa, Artificial Sequence
  source: /note="Description of Artificial Sequence: Synthetic polypeptide"
KAYDQQLKAGDNPYLRYNHADAEFQERLQEDTSFGGNLGRAVFQAKKRVLEPLGLVETPAKTAPGKKRPVDSPDSTSGIGKKGQQPAKKRLNFGQTGDSEPVPDPQPIGEPPAGPSGLGSGTMAAGGGAPMADNNEGADGVGNASGNWHCDSTRLGDRVITTSTRTWALPTYNNHLYKQISSQSAGSTNDNVYFGYSTPWGYFDFNRFHCHFSPRDWQRLINNNWGFRPKKLNFKLFNIQVKEVTTNDGVTTIANNLTSTVQVFSDSEYQLPYVLGSAHQGCLPPFPADVFMIPQYGYLTLNNGSQSVGRSSFYCLEYFPSQMLRTGNNFTFSYTFEDVPFHSSYAHSQSLGRLMNPLIDQYLYYLARTQSNAGGTAGNRELQFYQGGPTTMAEQAKNWLPGPCFRQQRVSKTLDQNNNSNFAWTGATKYHLNGRNSLVNPGVAMATHKDDEERFFPSSGVLIFGKTGAANKTTLENVLMTNEEEIRPTNPVATEEYGIVSSNLQAASTAAQTQVVNNQGALPGMVWQNRDVYLQGPIWAKIPHTDGNFHPSPLMGGFGLKHPPPQILIKNTPVPANPPEVFTPAKFASFITQYSTGQVSVEIEWELQKENSKRWNPEIQYTSNFDKQTGVDFAVDSQGVYSEP

SEQ ID NO: 32 - DNA, 1933 bp, Artificial Sequence; identical to SEQ ID NO: 30
  source: /note="Description of Artificial Sequence: Synthetic polynucleotide"

SEQ ID NO: 33 - protein, 644 aa, Artificial Sequence; identical to SEQ ID NO: 31
  source: /note="Description of Artificial Sequence: Synthetic polypeptide"

SEQ ID NO: 34 - DNA, 1933 bp, Artificial Sequence
  source: /note="Description of Artificial Sequence: Synthetic polynucleotide"
caaggcctacgaccagcagctcaaagcgggtgacaatccgtacctgcggtataaccacgccgacgccgagtttcaggagcgtcttcaagaagatacgtcttttgggggcaacctcgggcgagcagtcttccaggccaaaaagcgggttctcgaacctcttggtctggttgagacgccagctaagacggcacctggaaagaagcgaccggtagactcgccagactccacctcgggcatcggcaagaaaggccagcagcccgcgaaaaagagactcaactttgggcagactggcgactcagagtcagtccccgaccctcaaccaatcggagaaccaccagcaggcccctctggtctgggatctggtacaatggctgcaggcggtggcgcaccaatggctgacaatagcgagggcgccgacggagtgggtaatgcctcaggaaattggcattgcgattccacatggctgggcgacagagtcatcaccaccagcacccgaacctgggccctgcccacctacaacaaccacctctacaagcaaatctccagtcagtcagcagggagcaccaacgataacgtctatttcggctacagcaccccctgggggtattttgacttcaacagattccattgccacttctcaccacgtgactggcagcgacttatcaacaacaactggggattccggcccaagaagctcaacttcaagctcttcaacatccaggtcaaggaggtcacgacgaatgacggtgtcacaaccatcgctaataaccttaccagcacggttcaggtcttttcggactcggaatatcaactgccgtacgtcctcggctccgcgcaccagggctgcctgcctccgttcccggcagacgtgttcatgattccgcagtacggatacctgactctgaacaatggcagccaatcggtaggccgttcctccttctactgcctggagtactttccttctcagatgctgagaacgggcaacaacttcacctttagctacaccttcgaggacgtgcctttccacagcagctacgcgcacagccagagtctggaccggctgatgaatcccctcatcgaccagtacctgtactacttggccagaacacagagcaacgcaggaggtactgctggcaatcgggaactgcagttttatcagggcggacctaccaccatggccgaacaagcaaagaactggctgcccggaccttgcttccggcaacagagagtatccaagacgctggatcaaaataacaacagcaactttgcctggactggtgccacaaaataccatttaaatggaagaaattcattggttaatcccggtgtcgccatggcaacccacaaggacgacgaggaacgcttcttcccttcgagcggagttctaatttttggcaaaactggagcagctaataaaactacattagaaaacgtgctcatgacaaatgaagaagaaattcgtcctaccaacccggtagctaccgaggaatacgggattgtaagcagcaacttgcaggcggctagcaccgcagcccagacacaagttgttaacaaccagggagccttacctggcatggtctggcagaaccgggacgtgtacctgcaaggtcccatttgggccaagattcctcacacggacggcaactttcacccgtctcctctaatgggtggctttggactgaaacacccgcctccccagatcctgatcaaaaacacaccggtacctgctaatcctccagaagtgtttactcctgccaagcttgcttccttcatcacgcagtacagcaccgggcaagtcagcgttgagatcgagtgggagctgcagaaagagaacagcaagcgctggaacccagagattcagtacacctccaactttgacaaacagactggagtggactttgctgttgacagccagggtgtttactctgagcct

SEQ ID NO: 35 - protein, 644 aa, Artificial Sequence
  source: /note="Description of Artificial Sequence: Synthetic polypeptide"
KAYDQQLKAGDNPYLRYNHADAEFQERLQEDTSFGGNLGRAVFQAKKRVLEPLGLVETPAKTAPGKKRPVDSPDSTSGIGKKGQQPAKKRLNFGQTGDSESVPDPQPIGEPPAGPSGLGSGTMAAGGGAPMADNSEGADGVGNASGNWHCDSTWLGDRVITTSTRTWALPTYNNHLYKQISSQSAGSTNDNVYFGYSTPWGYFDFNRFHCHFSPRDWQRLINNNWGFRPKKLNFKLFNIQVKEVTTNDGVTTIANNLTSTVQVFSDSEYQLPYVLGSAHQGCLPPFPADVFMIPQYGYLTLNNGSQSVGRSSFYCLEYFPSQMLRTGNNFTFSYTFEDVPFHSSYAHSQSLDRLMNPLIDQYLYYLARTQSNAGGTAGNRELQFYQGGPTTMAEQAKNWLPGPCFRQQRVSKTLDQNNNSNFAWTGATKYHLNGRNSLVNPGVAMATHKDDEERFFPSSGVLIFGKTGAANKTTLENVLMTNEEEIRPTNPVATEEYGIVSSNLQAASTAAQTQVVNNQGALPGMVWQNRDVYLQGPIWAKIPHTDGNFHPSPLMGGFGLKHPPPQILIKNTPVPANPPEVFTPAKLASFITQYSTGQVSVEIEWELQKENSKRWNPEIQYTSNFDKQTGVDFAVDSQGVYSEP

SEQ ID NO: 36 - DNA, 1933 bp, Artificial Sequence
  source: /note="Description of Artificial Sequence: Synthetic polynucleotide"
caaggcctacgaccagcagctcaaagcgggtgacaatccgtacctgcggtataaccacgccgacgccgagtttcaggagcgtcttcaagaagatacgtcttttgggggcaacctcgggcgagcagtcttccaggccaaaaagcgggttctcgaacctcttggtctggttgagacgccagctaagacggcacctggaaagaagcgaccggtagactcgccagactccacctcgggcatcggcaagaaaggccagcagcccgcgaaaaagagactcaactttgggcagactggcgactcagagtcagtccccgaccctcaaccaatcggagaaccaccagcaggcccctctggtctgggatctggtacaatggctgcaggcggtggcgcaccaatggctgacaataacgagggcgccgacggagtgggtaatgcctcaggaaattggcattgcgattccacatggctgggcgacagagtcatcaccaccagcacccgaacctgggccctgcccacctacaacaaccacctctacaagcaaatctccagtcagtcagcagggagcaccaacgataacgtctatttcggctacagcaccccctgggggtattttgacttcaacagattccattgccacttctcaccacgtgactggcagcgacttatcaacaacaactggggattccggcccaagaagctcaacttcaagctcttcaacatccaggtcaaggaggtcacgacgaatgacggcgtcacaaccatcgctaataaccttaccagcacggttcaggtcttttcggacccggaatatcaactgccgtacgtcctcggctccgcgcaccagggctgcctgcctccgttcccggcagacgtgttcatgattccgcagtacggatacctgactctgaacaatggcagccaatcggtaggccgttcctccttctactgcctggagtactttccttctcagatgctgagaacgggcaacaacttcacctttagctacaccttcgaggacgtgcctttccacagcagctacgcgcacagccagagtctggaccggctgatgaatcccctcatcgaccagtacctgtactacttggccagaacacagagcaacgcaggaggtactgctggcaatcgggaactgcagttttatcagggcggacctaccaccatggccgaacaagcaaagaactggctgcccggaccttgcttccggcaacagagagtatccaagacgctggatcaaaataacaacagcaactttgcctggactggtgccacaaaataccatttaaatggaagaaattcattggttaatcccggtgtcgccatggcaacccacaaggacgacgaggaacgcttcttcccttcgagcggagttctaatttttggcaaaactggagcagctaataaaactacattagaaaacgtgctcatgacaaatgaagaagaaattcgtcctaccaacccggtagctaccgaggaatacgggattgtaagcagcaacttgcaggcggctagcaccgcagcccagacacaagttgttaacaaccagggagccttacctggcatggtctggcagaaccgggacgtgtacctgcaaggtcccatttgggccaagattcctcacacggacggcaactttcacccgtctcctctaatgggtggctttggactgaaacacccgcctccccagatcctgatcaaaaacacaccggtacctgctaatcctccagaagtgtttactcctgccaagattgcttccttcatcacgcagtacagcaccgggcaagtcagcgttgagatcgagtgggagctgcagaaagagaacagcaagcgctggaacccagagattcagtacacctccaactttgacaaacagactggagtggactttgctgttgacagccagggtgtttactctgagcct

SEQ ID NO: 37 - protein, 644 aa, Artificial Sequence
  source: /note="Description of Artificial Sequence: Synthetic polypeptide"
KAYDQQLKAGDNPYLRYNHADAEFQERLQEDTSFGGNLGRAVFQAKKRVLEPLGLVETPAKTAPGKKRPVDSPDSTSGIGKKGQQPAKKRLNFGQTGDSESVPDPQPIGEPPAGPSGLGSGTMAAGGGAPMADNNEGADGVGNASGNWHCDSTWLGDRVITTSTRTWALPTYNNHLYKQISSQSAGSTNDNVYFGYSTPWGYFDFNRFHCHFSPRDWQRLINNNWGFRPKKLNFKLFNIQVKEVTTNDGVTTIANNLTSTVQVFSDPEYQLPYVLGSAHQGCLPPFPADVFMIPQYGYLTLNNGSQSVGRSSFYCLEYFPSQMLRTGNNFTFSYTFEDVPFHSSYAHSQSLDRLMNPLIDQYLYYLARTQSNAGGTAGNRELQFYQGGPTTMAEQAKNWLPGPCFRQQRVSKTLDQNNNSNFAWTGATKYHLNGRNSLVNPGVAMATHKDDEERFFPSSGVLIFGKTGAANKTTLENVLMTNEEEIRPTNPVATEEYGIVSSNLQAASTAAQTQVVNNQGALPGMVWQNRDVYLQGPIWAKIPHTDGNFHPSPLMGGFGLKHPPPQILIKNTPVPANPPEVFTPAKIASFITQYSTGQVSVEIEWELQKENSKRWNPEIQYTSNFDKQTGVDFAVDSQGVYSEP

SEQ ID NO: 38 - protein, 738 aa, Artificial Sequence
  source: /note="Description of Artificial Sequence: Synthetic polypeptide"
MAADGYLPDWLEDNLSEGIREWWALKPGAPKPKANQQKQDDGRGLVLPGYKYLGPFNGLDKGEPVNAADAAALEHDKAYDQQLKAGDNPYLRYNHADAEFQERLQEDTSFGGNLGRAVFQAKKRVLEPLGLVEEGAKTAPGKKRPVEPSPQRSPDSTTGIGKKGQQPAKKRLNFGQTGDSESVPDPQPIGEPPAGPSGLGSGTMAAGGGAPMADNNEGADGVGSSSGNWHCDSTWLGDRVITTSTRTWALPTYNNHLYKQISNGTSGGSTNDNTYFGYSTPWGYFDFNRFHCHFSPRDWQRLINNNWGFRPKRLNFKLFNIQVKEVTQNEGTKTIANNLTSTIQVFTDSEYQLPYVLGSARQGCLPPFPADVFMIPQYGYLTLNNGSQAVGRSSFYCLEYFPSQMLRTGNNFEFSYQFEDVPFHSSYAHSQSLDRLMNPLIDQYLYYLSRTQSTGGTAGTQQLLFSQAGPNNMSAQAKNWLPGPCYRQQRVSTTLSQNNNSNFAWTGATKYHLNGRDSLVNPGVAMATHKDDEERFFPSSGVLMFGKQGAGKGNVDYSSVMLTSEEEIKTTNPVATEQYGVVADNLQQQNAAPIVGAVNSQGALPGMVWQNRDVYLQGPIWAKIPHTDGNFHPSPLMGGFGLKHPPPQILIKNTPVPADPPTTFSQAKLASFITQYSTGQVSVEIEWELQKENSKRWNPEIQYTSNYYKSTNVDFAVNTDGTYSEPRPIGTRYLTRNL

SEQ ID NO: 39 - DNA, 3121 bp, Artificial Sequence
  source: /note="Description of Artificial Sequence: Synthetic polynucleotide"
gaattcgcccttctacggctgcgtcaactggaccaatgagaactttcccttcaacgactgtgtcgacaagatggtgatctggtgggaggaggggaagatgaccgccaaggtcgtggagtcggccaaagccattctcggaggaagcaaggtgcgcgtggaccagaaatgcaagtcctcggcccagatagacccgactcccgtgatcgtcacctccaacaccaacatgtgcgccgtgattgacgggaactcaacgaccttcgaacaccagcagccgttgcaagaccggatgttcaaatttgaactcacccgccgtctggatcatgactttgggaaggtcaccaagcaggaagtcaaagactttttccggtgggcaaaggatcacgtggttgaggtggagcacgaattctacgtcaaaaagggtggagccaagaaaagacccgcccccagtgacgcagatataagtgagcccaaacgggtgcgcgagtcagttgcgcagccatcgacgtcagacgcggaagcttcgatcaactacgcagacaggtaccaaaacaaatgttctcgtcacgcgggcatgaatctgatgctgtttccctgcagacaatgcgagagaatgaatcagaattcaaatatctgcttcactcacggacagaaagactgtttagagtgctttcccgtgtcagaatctcaacccgtttctgtcgtcaaaaaggcgtatcagaaactgtgctacattcatcatatcatgggaaaggtgccagacgcttgcactgcctgcgatctggtcgatgtggatttggatgactgcatctttgaacaataaatgatttaaatcaggtatggctgccgatggttatcttccagattggctcgaggacaacctctctgagggcattcgcgagtggtgggcgctgaaacctggagccccgaagcccaaagccaaccagcaaaagcaggacggcggccggggtctggtgcttcctggctacaagtacctcggacccttcaacggactcgacaagggggagcccgtcaacgcggcggacgcagcggccctcgagcacgacaaggcctacgaccagcagctcaaagcgggtgacaatccgtacctgcggtataaccacgccgacgccgagtttcaggagcgtctgcaagaagatacgtcttttgggggcaacctcgggcgagcagtcttccaggccaagaagcgggttctcgaacctctcggtctggttgaggaaggcgctaagacggctcctggaaagaagagaccggtagagccatcaccccagcgttctccagactcctctacgggcatcggcaagaaaggccagcagcccgcgaaaaagagactcaactttgggcagactggcgactcagagtcagtgcccgaccctcaaccaatcggagaaccccccgcaggcccctctggtctgggatctggtacaatggctgcaggcggtggcgctccaatggcagacaataacgaaggcgccgacggagtgggtagttcctcaggaaattggcattgcgattccacatggctgggcgactgagtcatcaccaccagcacccgaacctgggccctccccacctacaacaaccacctctacaagcaaatctccaacgggacttcgggaggaagcaccaacgacaacacctacttcggctacagcaccccctgggggtattttgactttaacagattccactgccacttctcaccacgtgactggcagcgactcatcaacaacaactggggattccggcccaagagactcaacttcaagctcttcaacatccaggtcaaggaggtcacgcagaatgaaggcaccaagaccatcgccaataaccttaccagcacgattcaggtctttacggactcggaataccagctcccgtacgtcctcggctctgcgcaccagggctgcctgcctccgttcccggcggacgtcttcatgattcctcagtacgggtacctgactctgaacaatggcagtcaggccgtgggccgttcctccttctactgcctggagtactttccttctcaaatgctgagaacgggcaacaactttgagttcagctaccagtttgaggacgtgccttttcacagcagctacgcgcacagccaaagcctggaccggctgatgaaccccctcatcgaccagtacctgtactacctgtctcggactcagtccacgggaggtaccgcaggaactcagcagttgctattttctcaggccgggcctaataacatgtcggctcaggccaaaaactggctacccgggccctgctaccggcagtaacgcgtctccacgacactgtcgcaaaataacaacagcaactttgtctggaccggtgccaccaagtatcatctgaatggcagagactctctggtagatcccggtgtcgctatggcaacccacaaggacgacgaagagcgattttttccgtccagcggagtcataatgtttgggaaacagggagctggaaaagacaacgtggactatagcagcgtcatgctaaccagtgaggaagaaattaaaaccaccaacccagtggccacagaacagtacggcgtggtggccgataacctgcaacagcaaaacgccgctcctattgtaggggccgtcaacagtcaaggagccttacctggcatggtctggcagaaccgggacgtgtacctgcagggtcctacctgggccaagattcctcacacggacggaaactttcatccctcgccgctgatgggaggctttggactgaaacacccgcctcctcagatcctgattaagaatacacctgttcccgcggatcctccaactaccttcagtcaagctaagctggcgtcgttcatcacgcagtacagcaccggacaggtcagcgtggaaattgaatgggagctgcaggaagaaaacagcaaacgctggaacccagagattcaatacacttccaactactacaaatctacaaatgtggactttgctgttaacacagatggcacttattctgagcctcgccccatcggcacccgttacctcacccgtaatctgtaattgcttgttaatcaataaaccggttgattcgtttcagttgaactttggtctctgcgaagggcgaattc

SEQ ID NO: 40 - protein, 738 aa, Artificial Sequence
  source: /note="Description of Artificial Sequence: Synthetic polypeptide"
MAADGYLPDWLEDNLSEGIREWWALKPGAPKPKANQQKQDDGRGLVLPGYKYLGPFNGLDKGEPVNAADAAALEHDKAYDQQLKAGDNPYLRYNHADAEFQERLQEDTSFGGNLGRAVFQAKKRVLEPLGLVEEGAKTAPGKKRPVEPSPQRSPDSSTGIGKKGQQPAKKRLNFGQTGDSESVPDPQPIGEPPAGPSGLGSGTMAAGGGAPMADNNEGADGVGSSSGNWHCDSTWLGDGVITTSTRTWALPTYNNHLYKQISNGTSGGSTNDNTYFGYSTPWGYFDFNRFHCHFSPRDWQRLINNNWGFRPKSLNFKLFNIQVKEVTQNEGTKTIANNLTSTIQVFTDSEYQLPYVLGSAHQGCLPPFPADVFMIPQYGYLTLNNGSQAVGRSSFYCLEYFPSQMLRTGNNFEFSYQFEDVPFHSSYAHSQSLDRLMNPLIDQYLYYLSRTQSTGGTAGTQQLLFSQAGPNNMSAQAKNWLPGPCYRQQRVSTTLSQNDNSNFAWTGATKYHLNGRDSLVNPGVAMATHKDDEERFFPSSGVLMFGKQGAGKDNVDYSSVMLTSEEEIKTTNPVATEQYGVVADNLQQQNAAPIVGAVNSQGALPGMVWQNRDVYLQGPIWAKIPHTDGNFHPSPLMGGFGLKHPPPQILIKNTPVPADPPTTFSQAKLASFITQYSTGQVSVEIEWELQKENSKRWNPEIQYTSNYYKSTNVDFAVNTDGTYSEPRPIGTRYLTRNL

SEQ ID NO: 41 - DNA, 3121 bp, Artificial Sequence
  source: /note="Description of Artificial Sequence: Synthetic polynucleotide"
gaattcgcccttcgcgagaccaaagttcaactgaaacgaatcaaccggtttattgattaacaagcaattacagattacgggtgaggtaacgggtgccgatggggcgaggctcagaataagtgccatctgtgttaacagcaaagtccacatttgtagatttgtagtagttggaagtgtattgaatctctgggttccagcgtttgctgttttctttctgcagctcccattcaatttccacgctgacctgtccggtgctgtactgcgtgatgaacgacgccagcttagcttgactgaaggtagttggaggatccgcgggaacaggtgtattcttaatcaggatctgaggaggcgggtgtttcagtccaaagcctcccatcagcggcgagggatgaaagtttccgtccgtgtgaggaatcttggcccagataggaccctgcaggtacacgtcccggttctgccagaccatgccaggtaaggctccttgactgttgacggcccctacaataggagcggcgttttgctgttgcaggttatcggccaccacgccgtactgttctgtggccactgggttggtggttttaatttcttcctcactggttagcataacgctgctatagtccacgttgtcttttccagctccctgtttcccaaacattaagactccgctggacggaaaaaatcgctcttcgtcgtccttgtgggttgccatagcgacaccgggatttaccagagagtctctgccattcagatgatacttggtggcaccggtccaggcaaagttgctgttgtcattttgcgacagtgtcgtggagacgcgttgctgccggtagcagggcccgggtagccagtttttggcctgagccgacatgttattaggcccggcctgagaaaatagcaactgctgagttcctgcggtacctcccgtggactgagtccgagacaggtagtacaggtactggtcgatgagggggttcatcagccggtccaggctttggctgtgcgcgtagctgctgtgaaaaggcacgtcctcaaactggtagctgaactcaaagttgttgcccgttctcagcatttgagaaggaaagtactccaggcagtagaaggaggaacggcccacggcctgactgccattgttcagagtcaggtacccgtactgaggaatcatgaagacgtccgccgggaacggaggcaggcagccctggtgcgcagagccgaggacgtacgggagctggtattccgagtccgtaaagacctgaatcgtgctggtaaggttattggcgatggtcttggtgccttcattctgcgtgacctccttgacctggatgttgaagagcttgaagttgaggctcttgggccggaatccccagttgttgttgatgagtcgctgccagtcacgtggtgagaagtggcagtggaatctgttaaagtcaaaatacccccagggggtgctgtagccgaagtaggtgttgtcgttggtgcttcctcccgaagtcccgttggagatttgcttgtagaggtggttgttgtaggtggggagggcccaggttcgggtgctggtggtgatgactccgtcgcccagccatgtggaatcgcaatgccaatttcctgaggaactacccactccgtcggcgccttcgttattgtctgccattggagcgccaccgcctgcagccattgtaccagatcccagaccagaggggcctgcggggggttctccgattggttgagggtcgggcactgactctgagtcgccagtctgcccaaagttgagtctctttttcgcgggctgctggcctttcttgccgatgcccgtagaggagtctggagaacgctggggtgatggctctaccggtctcttctttccaggagccgtcttagcgccttcctcaaccagaccgagaggttcgagaacccgcttcttggcctggaagactgctcgcccgaggttgcccccaaaagacgtatcttcttgcagacgctcctgaaactcggcgtcggcgtggttataccgcaggtacggattgtcacccgctttgagctgctggtcgtaggccttgtcgtgctcgagggccgctgcgtccgccgcgttgacgggctcccccttgtcgagtccgttgaagggtccgaggtacttgtagccaggaagcaccagaccccggccgtcgtcctgcttttgctggttggctttgggcttcggggctccaggtttcagcgcccaccactcgcgaatgccctcagagaggttgtcctcgagccaatctggaagataaccatcggcagccatacctgatttaaatcatttattgttcaaagatgcagtcatccaaatccacattgaccagatcgcaggcagtgcaagcgtctggcacctttcccatgatatgatgaatgtagcacagtttctgatacgcctttttgacgacagaaacgggttgagattctgacacgggaaagcactctaaacagtctttctgtccgtgagtgaagcagatatttgaattctgattcattctctcgcattgtctgcagggaaacagcatcagattcatgcccacgtgacgagaacatttgttttggtacctgtctgcgtagttgatcgaagcttccgcgtctgacgtcgatggctgcgcaactgactcgcgcacccgtttgggctcacttatatctgcgtcactgggggcgggtcttttcttggctccaccctttttgacgtagaattcatgctccacctcaaccacgtgatcctttgcccaccggaaaaagtctttgacttcctgcttggtgaccttcccaaagtcatgatccagacggcgggtgagttcaaatttgaacatccggtcttgcaacggctgctggtgttcgaaggtcgttgagttcccgtcaatcacggcgcacatgttggtgttggaggtgacgatcacgggagtcgggtctatctgggccgaggacttgcatttctggtccacgcgcaccttgcttcctccgagaatggctttggccgactccacgaccttggcggtcatcttcccctcctcccaccagatcaccatcttgtcgacacagtcgttgaagggaaagttctcattggtccagttgacgcagccgtagaaagggcgaattc

SEQ ID NO: 42 - DNA, 2211 bp, Artificial Sequence
  source: /note="Description of Artificial Sequence: Synthetic polynucleotide"
atggctgctgacggttatcttccagattggctcgaggacaacctttctgaaggcattcgtgagtggtgggctctgaaacctggagtccctcaacccaaagcgaaccaacaacaccaggacaaccgtcggggtcttgtgcttccgggttacaaatacctcggacccggtaacggactcgacaaaggagagccggtcaacgaggcggacgcggcagccctcgaacacgacaaagcttacgaccagcagctcaaggccggtgacaacccgtacctcaagtacaaccacgccgacgccgagtttcaggagcgtcttcaagaagatacgtcttttgggggcaaccttggcagagcagtcttccaggccaaaaagaggatccttgagcctcttggtctggttgaggaagcagctaaaacggctcctggaaagaagggggctgtagatcagtctcctcaggaaccggactcatcatctggtgttggcaaatcgggcaaacagcctgccagaaaaagactaaatttcggtcagactggagactcagagtcagtcccagaccctcaacctctcggagaaccaccagcagcccccacaagtttgggatctaatacaatggcttcaggcggtggcgcaccaatggcagacaataacgagggtgccgatggagtgggtaattcctcaggaaattggcattgcgattcccaatggctgggcgacagagtcatcaccaccagcaccagaacctgggccctgcccacttacaacaaccatctctacaagcaaatctccagccaatcaggagcttcaaacgacaaccactactttggctacagcaccccttgggggtattttgactttaacagattccactgccacttctcaccacgtgactggcagcgactcattaacaacaactggggattccggcccaagaaactcagcttcaagctcttcaacatccaagttagaggggtcacgcagaacgatggcacgacgactattgccaataaccttaccagcacggttcaagtgtttacggactcggagtatcagctcccgtacgtgctcgggtcggcgcaccaaggctgtctcccgccgtttccagcggacgtcttcatggtccctcagtatggatacctcaccctgaacaacggaagtcaagcggtgggacgctcatccttttactgcctggagtacttcccttcgcagatgctaaggactggaaataacttccaattcagctataccttcgaggatgtaccttttcacagcagctacgctcacagccagagtttggatcgcttgatgaatcctcttattgatcagtatctgtactacctgaacagaacgcaaggaacaacctctggaacaaccaaccaatcacggctgctttttagccaggctgggcctcagtctatgtctttgcaggccagaaattggctacctgggccctgctaccggcaacagagactttcaaagactgctaacgacaacaacaacagtaactttccttggacagcggccagcaaatatcatctcaatggccgcgactcgctggtgaatccaggaccagctatggccagtcacaaggacgatgaagaaaaatttttccctatgcacggcaatctaatatttggcaaagaagggacaacggcaagtaacgcagaattagataatgtaatgattacggatgaagaagagattcgtaccaccaatcctgtggcaacagagcagtatggaactgtggcaaataacttgcagagctcaaatacagctcccacgactggaactgtcaatcatcagggggccttacctggcatggtgtggcaagatcgtgacgtgtaccttcaaggacctatctgggcaaagattcctcacacggatggacactttcatccttctcctctgatgggaggctttggactgaaacatccgcctcctcaaatcatgatcaaaaatactccggtaccggcaaatcctccgacgactttcagcccggccaagtttgcttcatttatcactcagtactccactggacaggtcagcgtggaaattgagtgggagctacagaaagaaaacagcaaacgttggaatccagagattcagtacacttccaactacaacaagtctgttaatgtggactttactgtagacactaatggtgtttatagtgaacctcgccctattggaacccggtatctcacacgaaacttgtga

SEQ ID NO: 43 - protein, 736 aa, Adeno-associated virus 3
MAADGYLPDWLEDNLSEGIREWWALKPGVPQPKANQQHQDNRRGLVLPGYKYLGPGNGLDKGEPVNEADAAALEHDKAYDQQLKAGDNPYLKYNHADAEFQERLQEDTSFGGNLGRAVFQAKKRILEPLGLVEEAAKTAPGKKGAVDQSPQEPDSSSGVGKSGKQPARKRLNFGQTGDSESVPDPQPLGEPPAAPTSLGSNTMASGGGAPMADNNEGADGVGNSSGNWHCDSQWLGDRVITTSTRTWALPTYNNHLYKQISSQSGASNDNHYFGYSTPWGYFDFNRFHCHFSPRDWQRLINNNWGFRPKKLSFKLFNIQVRGVTQNDGTTTIANNLTSTVQVFTDSEYQLPYVLGSAHQGCLPPFPADVFMVPQYGYLTLNNGSQAVGRSSFYCLEYFPSQMLRTGNNFQFSYTFEDVPFHSSYAHSQSLDRLMNPLIDQYLYYLNRTQGTTSGTTNQSRLLFSQAGPQSMSLQARNWLPGPCYRQQRLSKTANDNNNSNFPWTAASKYHLNGRDSLVNPGPAMASHKDDEEKFFPMHGNLIFGKEGTTASNAELDNVMITDEEEIRTTNPVATEQYGTVANNLQSSNTAPTTGTVNHQGALPGMVWQDRDVYLQGPIWAKIPHTDGHFHPSPLMGGFGLKHPPPQIMIKNTPVPANPPTTFSPAKFASFITQYSTGQVSVEIEWELQKENSKRWNPEIQYTSNYNKSVNVDFTVDTNGVYSEPRPIGTRYLTRNL

SEQ ID NO: 44 - DNA, 4726 bp, Adeno-associated virus 3
ttggccactccctctatgcgcactcgctcgctcggtggggcctggcgaccaaaggtcgccagacggacgtgctttgcacgtccggccccaccgagcgagcgagtgcgcatagagggagtggccaactccatcactagaggtatggcagtgacgtaacgcgaagcgcgcgaagcgagaccacgcctaccagctgcgtcagcagtcaggtgacccttttgcgacagtttgcgacaccacgtggccgctgagggtatatattctcgagtgagcgaaccaggagctccattttgaccgcgaaatttgaacgagcagcagccatgccggggttctacgagattgtcctgaaggtcccgagtgacctggacgagcgcctgccgggcatttctaactcgtttgttaactgggtggccgagaaggaatgggacgtgccgccggattctgacatggatccgaatctgattgagcaggcacccctgaccgtggccgaaaagcttcagcgcgagttcctggtggagtggcgccgcgtgagtaaggccccggaggccctcttttttgtccagttcgaaaagggggagacctacttccacctgcacgtgctgattgagaccatcggggtcaaatccatggtggtcggccgctacgtgagccagattaaagagaagctggtgacccgcatctaccgcggggtcgagccgcagcttccgaactggttcgcggtgaccaaaacgcgaaatggcgccgggggcgggaacaaggtggtggacgactgctacatccccaactacctgctccccaagacccagcccgagctccagtgggcgtggactaacatggaccagtatttaagcgcctgtttgaatctcgcggagcgtaaacggctggtggcgcagcatctgacgcacgtgtcgcagacgcaggagcagaacaaagagaatcagaaccccaattctgacgcgccggtcatcaggtcaaaaacctcagccaggtacatggagctggtcgggtggctggtggaccgcgggatcacgtcagaaaagcaatggattcaggaggaccaggcctcgtacatctccttcaacgccgcctccaactcgcggtcccagatcaaggccgcgctggacaatgcctccaagatcatgagcctgacaaagacggctccggactacctggtgggcagcaacccgccggaggacattaccaaaaatcggatctaccaaatcctggagctgaacgggtacgatccgcagtacgcggcctccgtcttcctgggctgggcgcaaaagaagttcgggaagaggaacaccatctggctctttgggccggccacgacgggtaaaaccaacatcgcggaagccatcgcccacgccgtgcccttctacggctgcgtaaactggaccaatgagaactttcccttcaacgattgcgtcgacaagatggtgatctggtgggaggagggcaagatgacggccaaggtcgtggagagcgccaaggccattctgggcggaagcaaggtgcgcgtggaccaaaagtgcaagtcatcggcccagatcgaacccactcccgtgatcgtcacctccaacaccaacatgtgcgccgtgattgacgggaacagcaccaccttcgagcatcagcagccgctgcaggaccggatgtttgaatttgaacttacccgccgtttggaccatgactttgggaaggtcaccaaacaggaagtaaaggactttttccggtgggcttccgatcacgtgactgacgtggctcatgagttctacgtcagaaagggtggagctaagaaacgccccgcctccaatgacgcggatgtaagcgagccaaaacgggagtgcacgtcacttgcgcagccgacaacgtcagacgcggaagcaccggcggactacgcggacaggtaccaaaacaaatgttctcgtcacgtgggcatgaatctgatgctttttccctgtaaaacatgcgagagaatgaatcaaatttccaatgtctgttttacgcatggtcaaagagactgtggggaatgcttccctggaatgtcagaatctcaacccgtttctgtcgtcaaaaagaagacttatcagaaactgtgtccaattcatcatatcctgggaagggcacccgagattgcctgttcggcctgcgatttggccaatgtggacttggatgactgtgtttctgagcaataaatgacttaaaccaggtatggctgctgacggttatcttccagattggctcgaggacaacctttctgaaggcattcgtgagtggtgggctctgaaacctggagtccctcaacccaaagcgaaccaacaacaccaggacaaccgtcggggtcttgtgcttccgggttacaaatacctcggacccggtaacggactcgacaaaggagagccggtcaacgaggcggacgcggcagccctcgaacacgacaaagcttacgaccagcagctcaaggccggtgacaacccgtacctcaagtacaaccacgccgacgccgagtttcaggagcgtcttcaagaagatacgtcttttgggggcaaccttggcagagcagtcttccaggccaaaaagaggatccttgagcctcttggtctggttgaggaagcagctaaaacggctcctggaaagaagggggctgtagatcagtctcctcaggaaccggactcatcatctggtgttggcaaatcgggcaaacagcctgccagaaaaagactaaatttcggtcagactggagactcagagtcagtcccagaccctcaacctctcggagaaccaccagcagcccccacaagtttgggatctaatacaatggcttcaggcggtggcgcaccaatggcagacaataacgagggtgccgatggagtgggtaattcctcaggaaattggcattgcgattcccaatggctgggcgacagagtcatcaccaccagcaccagaacctgggccctgcccacttacaacaaccatctctacaagcaaatctccagccaatcaggagcttcaaacgacaaccactactttggctacagcaccccttgggggtattttgactttaacagattccactgccacttctcaccacgtgactggcagcgactcattaacaacaactggggattccggcccaagaaactcagcttcaagctcttcaacatccaagttagaggggtcacgcagaacgatggcacgacgactattgccaataaccttaccagcacggttcaagtgtttacggactcggagtatcagctcccgtacgtgctcgggtcggcgcaccaaggctgtctcccgccgtttccagcggacgtcttcatggtccctcagtatggatacctcaccctgaacaacggaagtcaagcggtgggacgctcatccttttactgcctggagtacttcccttcgcagatgctaaggactggaaataacttccaattcagctataccttcgaggatgtaccttttcacagcagctacgctcacagccagagtttggatcgcttgatgaatcctcttattgatcagtatctgtactacctgaacagaacgcaaggaacaacctctggaacaaccaaccaatcacggctgctttttagccaggctgggcctcagtctatgtctttgcaggccagaaattggctacctgggccctgctaccggcaacagagactttcaaagactgctaacgacaacaacaacagtaactttccttggacagcggccagcaaatatcatctcaatggccgcgactcgctggtgaatccaggaccagctatggccagtcacaaggacgatgaagaaaaatttttccctatgcacggcaatctaatatttggcaaagaagggacaacggcaagtaacgcagaattagataatgtaatgattacggatgaagaagagattcgtaccaccaatcctgtggcaacagagcagtatggaactgtggcaaataacttgcagagctcaaatacagctcccacgactggaactgtcaatcatcagggggccttacctggcatggtgtggcaagatcgtgacgtgtaccttcaaggacctatctgggcaaagattcctcacacggatggacactttcatccttctcctctgatgggaggctttggactgaaacatccgcctcctcaaatcatgatcaaaaatactccggtaccggcaaatcctccgacgactttcagcccggccaagtttgcttcatttatcactcagtactccactggacaggtcagcgtggaaattgagtgggagctacagaaagaaaacagcaaacgttggaatccagagattcagtacacttccaactacaacaagtctgttaatgtggactttactgtagacactaatggtgtttatagtgaacctcgccctattggaacccggtatctcacacgaaacttgtgaatcctggttaatcaataaaccgtttaattcgtttcagttgaactttggctcttgtgcacttctttatctttatcttgtttccatggctactgcgtagataagcagcggcctgcggcgcttgcgcttcgcggtttacaactgctggttaatatttaactctcgccatacctctagtgatggagttggccactccctctatgcgcactcgctcgctcggtggggcctggcgaccaaaggtcgccagacggacgtgctttgcacgtccggccccaccgagcgagcgagtgcgcatagagggagtggccaa

SEQ ID NO: 45 - protein, 737 aa, Artificial Sequence
  source: /note="Description of Artificial Sequence: Synthetic polypeptide"
MAADGYLPDWLEDNLSEGIREWWDLKPGAPKPKANQQKQDNGRGLVLPGYKYLGPFNGLDKGEPVNAADAAALEHDKAYDQQLNAGDNPYLRYNHADAEFQERLQEDTSFGGNLGRAVFQAKKRVLEPLGLVEEGAKTAPAKKRPVEPSPQRSPDSSTGIGKKGQQPARKRLNFGQTGDSESVPDPQPLGEPPAAPSSVGSGTVAAGGGAPMADNNEGADGVGNASGNWHCDSTWLGDRVITTSTRTWALPTYNNHLYEQISSETAGSTNDNTYFGYSTPWGYFDFNRFHCHFSPRDWQRLINNNWGFRPKKLRFKLFNIQVKEVTTNDGVTTIANNLTSTIQVFSDSEYQLPYVLGSAHQGCLPPFPADVFMIPQYGYLTLNNGSQSVGRSSFYCLEYFPSQMLRTGNNFEFSYSFEDVPFHSSYAHSQSLDRLMNPLIDQYLYYLARTQSDPGGTAGNRELQFYQGGPSTMAEQAKNWLPGPCFRQQRVSKTLDQNNNSNFAWTGATKYHLNGRNSLVNPGVAMATHKDDEDRFFPSSGVLIFGKTGATNKTTLENVLMTNEEEIRPTNPVATEEYGIVSSNLQAANTAAQTQVVNNQGALPGMVWQNRDVYLQGPIWAKIPHTDGNFHPSPLMGGFGLKHPPPQILIKNTPVPANPPEVFTPAKFASFITQYSTGQVSVEIEWELQKENSKRWDPEIQYTSNFEKQTGVDFAVDSQGVYSEPRPIGTRYLTRNL

SEQ ID NO: 46 - DNA, 2211 bp, Artificial Sequence
  source: /note="Description of Artificial Sequence: Synthetic polynucleotide"
atggctgctgacggttatcttccagattggctcgaggacaacctttctgaaggcattcgtgagtggtgggctctgaaacctggagtccctcaacccaaagcgaaccaacaacaccaggacaaccgtcggggtcttgtgcttccgggttacaaatacctcggacccggtaacggactcgacaaaggagagccggtcaacgaggcggacgcggcagccctcgaacacgacaaagcttacgaccagcagctcaaggccggtgacaacccgtacctcaagtacaaccacgccgacgccgagtttcaggagcgtcttcaagaagatacgtcttttgggggcaaccttggcagagcagtcttccaggccaaaaagaggatccttgagcctcttggtctggttgaggaagcagctaaaacggctcctggaaagaagggggctgtagatcagtctcctcaggaaccggactcatcatctggtgttggcaaatcgggcaaacagcctgccagaaaaagactaaatttcggtcagactggagactcagagtcagtcccagaccctcaacctctcggagaaccaccagcagcccccacaagtttgggatctaatacaatggcttcaggcggtggcgcaccaatggcagacaataacgagggtgccgatggagtgggtaattcctcaggaaattggcattgcgattcccaatggctgggcgacagagtcatcaccaccagcaccagaacctgggccctgcccacttacaacaaccatctctacaagcaaatctccagccaatcaggagcttcaaacgacaaccactactttggctacagcaccccttgggggtattttgactttaacagattccactgccacttctcaccacgtgactggcagcgactcattaacaacaactggggattccggcccaagaaactcagcttcaagctcttcaacatccaagttagaggggtcacgcagaacgatggcacgacgactattgccaataaccttaccagcacggttcaagtgtttacggactcggagtatcagctcccgtacgtgctcgggtcggcgcaccaaggctgtctcccgccgtttccagcggacgtcttcatggtccctcagtatggatacctcaccctgaacaacggaagtcaagcggtgggacgctcatccttttactgcctggagtacttcccttcgcagatgctaaggactggaaataacttccaattcagctataccttcgaggatgtaccttttcacagcagctacgctcacagccagagtttggatcgcttgatgaatcctcttattgatcagtatctgtactacctgaacagaacgcaaggaacaacctctggaacaaccaaccaatcacggctgctttttagccaggctgggcctcagtctatgtctttgcaggccagaaattggctacctgggccctgctaccggcaacagagactttcaaagactgctaacgacaacaacaacagtaactttccttggacagcggccagcaaatatcatctcaatggccgcgactcgctggtgaatccaggaccagctatggccagtcacaaggacgatgaagaaaaatttttccctatgcacggcaatctaatatttggcaaagaagggacaacggcaagtaacgcagaattagataatgtaatgattacggatgaagaagagattcgtaccaccaatcctgtggcaacagagcagtatggaactgtggcaaataacttgcagagctcaaatacagctcccacgactggaactgtcaatcatcagggggccttacctggcatggtgtggcaagatcgtgacgtgtaccttcaaggacctatctgggcaaagattcctcacacggatggacactttcatccttctcctctgatgggaggctttggactgaaacatccgcctcctcaaatcatgatcaaaaatactccggtaccggcaaatcctccgacgactttcagcccggccaagtttgcttcatttatcactcagtactccactggacaggtcagcgtggaaattgagtgggagctacagaaagaaaacagcaaacgttggaatccagagattcagtacacttccaactacaacaagtctgttaatgtggactttactgtagacactaatggtgtttatagtgaacctcgccctattggaacccggtatctcacacgaaacttgtaa

SEQ ID NO: 47 - protein, 736 aa, Artificial Sequence; identical to SEQ ID NO: 43
  source: /note="Description of Artificial Sequence: Synthetic polypeptide"

SEQ ID NO: 48 - protein, 736 aa, Adeno-associated virus 3; identical to SEQ ID NO: 43

SEQ ID NO: 49 - protein, 624 aa, Adeno-associated virus 3
MPGFYEIVLKVPSDLDERLPGISNSFVNWVAEKEWDVPPDSDMDPNLIEQAPLTVAEKLQREFLVEWRRVSKAPEALFFVQFEKGETYFHLHVLIETIGVKSMVVGRYVSQIKEKLVTRIYRGVEPQLPNWFAVTKTRNGAGGGNKVVDDCYIPNYLLPKTQPELQWAWTNMDQYLSACLNLAERKRLVAQHLTHVSQTQEQNKENQNPNSDAPVIRSKTSARYMELVGWLVDRGITSEKQWIQEDQASYISFNAASNSRSQIKAALDNASKIMSLTKTAPDYLVGSNPPEDITKNRIYQILELNGYDPQYAASVFLGWAQKKFGKRNTIWLFGPATTGKTNIAEAIAHAVPFYGCVNWTNENFPFNDCVDKMVIWWEEGKMTAKVVESAKAILGGSKVRVDQKCKSSAQIEPTPVIVTSNTNMCAVIDGNSTTFEHQQPLQDRMFEFELTRRLDHDFGKVTKQEVKDFFRWASDHVTDVAHEFYVRKGGAKKRPASNDADVSEPKRECTSLAQPTTSDAEAPADYADRYQNKCSRHVGMNLMLFPCKTCERMNQISNVCFTHGQRDCGECFPGMSESQPVSVVKKKTYQKLCPIHHILGRAPEIACSACDLANVDLDDCVSEQ

SEQ ID NO: 50 - protein, 736 aa, Adeno-associated virus 3
MAADGYLPDWLEDNLSEGIREWWALKPGVPQPKANQQHQDNRRGLVLPGYKYLGPGNGLDKGEPVNEADAAALEHDKAYDQQLKAGDNPYLKYNHADAEFQERLQEDTSFGGNLGRAVFQAKKRILEPLGLVEEAAKTAPGKKRPVDQSPQEPDSSSGVGKSGKQPARKRLNFGQTGDSESVPDPQPLGEPPAAPTSLGSNTMASGGGAPMADNNEGADGVGNSSGNWHCDSQWLGDRVITTSTRTWALPTYNNHLYKQISSQSGASNDNHYFGYSTPWGYFDFNRFHCHFSPRDWQRLINNNWGFRPKKLSFKLFNIQVKEVTQNDGTTTIANNLTSTVQVFTDSEYQLPYVLGSAHQGCLPPFPADVFMVPQYGYLTLNNGSQAVGRSSFYCLEYFPSQMLRTGNNFQFSYTFEDVPFHSSYAHSQSLDRLMNPLIDQYLYYLNRTQGTTSGTTNQSRLLFSQAGPQSMSLQARNWLPGPCYRQQRLSKTANDNNNSNFPWTAASKYHLNGRDSLVNPGPAMASHKDDEEKFFPMHGNLIFGKEGTTASNAELDNVMITDEEEIRTTNPVATEQYGTVANNLQSSNTAPTTRTVNDQGALPGMVWQDRDVYLQGPIWAKIPHTDGHFHPSPLMGGFGLKHPPPQIMIKNTPVPANPPTTFSPAKFASFITQYSTGQVSVEIEWELQKENSKRWNPEIQYTSNYNKSVNVDFTVDTNGVYSEPRPIGTRYLTRNL

SEQ ID NO: 51 - protein, 624 aa, Adeno-associated virus 3
MPGFYEIVLKVPSDLDEHLPGISNSFVNWVAEKEWELPPDSDMDPNLIEQAPLTVAEKLQREFLVEWRRVSKAPEALFFVQFEKGETYFHLHVLIETIGVKSMVVGRYVSQIKEKLVTRIYRGVEPQLPNWFAVTKTRNGAGGGNKVVDDCYIPNYLLPKTQPELQWAWTNMDQYLSACLNLAERKRLVAQHLTHVSQTQEQNKENQNPNSDAPVIRSKTSARYMELVGWLVDRGITSEKQWIQEDQASYISFNAASNSRSQIKAALDNASKIMSLTKTAPDYLVGSNPPEDITKNRIYQILELNGYDPQYAASVFLGWAQKKFGKRNTIWLFGPATTGKTNIAEAIAHAVPFYGCVNWTNENFPFNDCVDKMVIWWEEGKMTAKVVESAKAILGGSKVRVDQKCKSSAQIEPTPVIVTSNTNMCAVIDGNSTTFEHQQPLQDRMFKFELTRRLDHDFGKVTKQEVKDFFRWASDHVTDVAHEFYVRKGGAKKRPASNDADVSEPKRQCTSLAQPTTSDAEAPADYADRYQNKCSRHVGMNLMLFPCKTCERMNQISNVCFTHGQRDCGECFPGMSESQPVSVVKKKTYQKLCPIHHILGRAPEIACSACDLANVDLDDCVSEQ

SEQ ID NO: 52 - DNA, 4722 bp, Adeno-associated virus 3
tggccactccctctatgcgcactcgctcgctcggtggggcctggcgaccaaaggtcgccagacggacgtgctttgcacgtccggccccaccgagcgagcgagtgcgcatagagggagtggccaactccatcactagaggtatggcagtgacgtaacgcgaagcgcgcgaagcgagaccacgcctaccagctgcgtcagcagtcaggtgacccttttgcgacagtttgcgacaccacgtggccgctgagggtatatattctcgagtgagcgaaccaggagctccattttgaccgcgaaatttgaacgagcagcagccatgccggggttctacgagattgtcctgaaggtcccgagtgacctggacgagcacctgccgggcatttctaactcgtttgttaactgggtggccgagaaggaatgggagctgccgccggattctgacatggatccgaatctgattgagcaggcacccctgaccgtggccgaaaagcttcagcgcgagttcctggtggagtggcgccgcgtgagtaaggccccggaggccctcttttttgtccagttcgaaaagggggagacctacttccacctgcacgtgctgattgagaccatcggggtcaaatccatggtggtcggccgctacgtgagccagattaaagagaagctggtgacccgcatctaccgcggggtcgagccgcagcttccgaactggttcgcggtgaccaaaacgcgaaatggcgccgggggcgggaacaaggtggtggacgactgctacatccccaactacctgctccccaagacccagcccgagctccagtgggcgtggactaacatggaccagtatttaagcgcctgtttgaatctcgcggagcgtaaacggctggtggcgcagcatctgacgcacgtgtcgcagacgcaggagcagaacaaagagaatcagaaccccaattctgacgcgccggtcatcaggtcaaaaacctcagccaggtacatggagctggtcgggtggctggtggaccgcgggatcacgtcagaaaagcaatggattcaggaggaccaggcctcgtacatctccttcaacgccgcctccaactcgcggtcccagatcaaggccgcgctggacaatgcctccaagatcatgagcctgacaaagacggctccggactacctggtgggcagcaacccgccggaggacattaccaaaaatcggatctaccaaatcctggagctgaacgggtacgatccgcagtacgcggcctccgtcttcctgggctgggcgcaaaagaagttcgggaagaggaacaccatctggctctttgggccggccacgacgggtaaaaccaacatcgcggaagccatcgcccacgccgtgcccttctacggctgcgtaaactggaccaatgagaactttcccttcaacgattgcgtcgacaagatggtgatctggtgggaggagggcaagatgacggccaaggtcgtggagagcgccaaggccattctgggcggaagcaaggtgcgcgtggaccaaaagtgcaagtcatcggcccagatcgaacccactcccgtgatcgtcacctccaacaccaacatgtgcgccgtgattgacgggaacagcaccaccttcgagcatcagcagccgctgcaggaccggatgtttaaatttgaacttacccgccgtttggaccatgactttgggaaggtcaccaaacaggaagtaaaggactttttccggtgggcttccgatcacgtgactgacgtggctcatgagttctacgtcagaaagggtggagctaagaaacgccccgcctccaatgacgcggatgtaagcgagccaaaacggcagtgcacgtcacttgcgcagccgacaacgtcagacgcggaagcaccggcggactacgcggacaggtaccaaaacaaatgttctcgtcacgtgggcatgaatctgatgctttttccctgtaaaacatgcgagagaatgaatcaaatttccaatgtctgttttacgcatggtcaaagagactgtggggaatgcttccctggaatgtcagaatctcaacccgtttctgtcgtcaaaaagaagacttatcagaaactgtgtccaattcatcatatcctgggaagggcacccgagattgcctgttcggcctgcgatttggccaatgtggacttggatgactgtgtttctgagcaataaatgacttaaaccaggtatggctgctgacggttatcttccagattggctcgaggacaacctttctgaaggcattcgtgagtggtgggctctgaaacctggagtccctcaacccaaagcgaaccaacaacaccaggacaaccgtcggggtcttgtgcttccgggttacaaatacctcggacccggtaacggactcgacaaaggagagccggtcaacgaggcggacgcggcagccctcgaacacgacaaagcttacgaccagcagctcaaggccggtgacaacccgtacctcaagtacaaccacgccgacgccgagtttcaggagcgtcttcaagaagatacgtcttttgggggcaaccttggcagagcagtcttccaggccaaaaagaggatccttgagcctcttggtctggttgaggaagcagctaaaacggctcctggaaagaagaggcctgtagatcagtctcctcaggaaccggactcatcatctggtgttggcaaatcgggcaaacagcctgccagaaaaagactaaatttcggtcagactggcgactcagagtcagtcccagaccctcaacctctcggagaaccaccagcagcccccacaagtttgggatctaatacaatggcttcaggcggtggcgcaccaatggcagacaataacgagggtgccgatggagtgggtaattcctcaggaaattggcattgcgattcccaatggctgggcgacagagtcatcaccaccagcaccagaacctgggccctgcccacttacaacaaccatctctacaagcaaatctccagccaatcaggagcttcaaacgacaaccactactttggctacagcaccccttgggggtattttgactttaacagattccactgccacttctcaccacgtgactggcagcgactcattaacaacaactggggattccggcccaagaaactcagcttcaagctcttcaacatccaagttaaagaggtcacgcagaacgatggcacgacgactattgccaataaccttaccagcacggttcaagtgtttacggactcggagtatcagctcccgtacgtgctcgggtcggcgcaccaaggctgtctcccgccgtttccagcggacgtcttcatggtccctcagtatggatacctcaccctgaacaacggaagtcaagcggtgggacgctcatccttttactgcctggagtacttcccttcgcagatgctaaggactggaaataacttccaattcagctataccttcgaggatgtaccttttcacagcagctacgctcacagccagagtttggatcgcttgatgaatcctcttattgatcagtatctgtactacctgaacagaacgcaaggaacaacctctggaacaaccaaccaatcacggctgctttttagccaggctgggcctcagtctatgtctttgcaggccagaaattggctacctgggccctgctaccggcaacagagactttcaaagactgctaacgacaacaacaacagtaactttccttggacagcggccagcaaatatcatctcaatggccgcgactcgctggtgaatccaggaccagctatggccagtcacaaggacgatgaagaaaaatttttccctatgcacggcaatctaatatttggcaaagaagggacaacggcaagtaacgcagaattagataatgtaatgattacggatgaagaagagattcgtaccaccaatcctgtggcaacagagcagtatggaactgtggcaaataacttgcagagctcaaatacagctcccacgactagaactgtcaatgatcagggggccttacctggcatggtgtggcaagatcgtgacgtgtaccttcaaggacctatctgggcaaagattcctcacacggatggacactttcatccttctcctctgatgggaggctttggactgaaacatccgcctcctcaaatcatgatcaaaaatactccggtaccggcaaatcctccgacgactttcagcccggccaagtttgcttcatttatcactcagtactccactggacaggtcagcgtggaaattgagtgggagctacagaaagaaaacagcaaacgttggaatccagagattcagtacacttccaactacaacaagtctgttaatgtggactttactgtagacactaatggtgtttatagtgaacctcgccctattggaacccggtatctcacacgaaacttgtaatcctggttaatcaataaaccgtttaattcgtttcagttgaactttggctcttgtgcacttcttatcttatcttgtttccatggctactgcgtagataagcagcggcctgcggcgcttgcgcttcgcggtttacaactgctggttaatatttaactctcgccatacctctagtgatggagttggccactccctctatgcgcactcgctcgctcggtggggccggacgtgcaaagcacgtccgtctggcgacctttggtcgccaggccccaccgagcgagcgagtgcgcatagagggagtggccaa

SEQ ID NO: 53 - DNA, 1800 bp, Adeno-associated virus 4
  modified_base (342)..(342): a, c, t, or g
acggctcctggaaagaagagaccgttgattgaatccccccagcagcccgactcctccacgggtatcggcaaaaaaggcaagcagccggctaaaaagaagctcgttttcgaagacgaaactggagcaggcgacggaccccctgagggatcaacttccggagccatgtctgatgacagtgagatgcgtgcagcagctggcggagctgcagtcgagggsggacaaggtgccgatggagtgggtaatgcctcgggtgattggcattgcgattccacctggtctgagggccacgtcacgaccaccagcaccagaacctgggtcttgcccacctacaacaaccacctntacaagcgactcggagagagcctgcagtccaacacctacaacggattctccaccccctggggatactttgacttcaaccgcttccactgccacttctcaccacgtgactggcagcgactcatcaacaacaactggggcatgcgacccaaagccatgcgggtcaaaatcttcaacatccaggtcaaggaggtcacgacgtcgaacggcgagacaacggtggctaataaccttaccagcacggttcagatctttgcggactcgtcgtacgaactgccgtacgtgatggatgcgggtcaagagggcagcctgcctccttttcccaacgacgtctttatggtgccccagtacggctactgtggactggtgaccggcaacacttcgcagcaacagactgacagaaatgccttctactgcctggagtactttccttcgcagatgctgcggactggcaacaactttgaaattacgtacagttttgagaaggtgcctttccactcgatgtacgcgcacagccagagcctggaccggctgatgaaccctctcatcgaccagtacctgtggggactgcaatcgaccaccaccggaaccaccctgaatgccgggactgccaccaccaactttaccaagctgcggcctaccaacttttccaactttaaaaagaactggctgcccgggccttcaatcaagcagcagggcttctcaaagactgccaatcaaaactacaagatccctgccaccgggtcagacagtctcatcaaatacgagacgcacagcactctggacggaagatggagtgccctgacccccggacctccaatggccacggctggacctgcggacagcaagttcagcaacagccagctcatctttgcggggcctaaacagaacggcaacacggccaccgtacccgggactctgatcttcacctctgaggaggagctggcagccaccaacgccaccgatacggacatgtggggcaacctacctggcggtgaccagagcaacagcaacctgccgaccgtggacagactgacagccttgggagccgtgcctggaatggtctggcaaaacagagacatttactaccagggtcccatttgggccaagattcctcataccgatggacactttcacccctcaccgctgattggtgggtttgggctgaaacacccgcctcctcaaatttttatcaagaacaccccggtacctgcgaatcctgcaacgaccttcagctctactccggtaaactccttcattactcagtacagcactggccaggtgtcggtgcagattgactgggagatccagaaggagcggtccaaacgctggaaccccgaggtccagtttacctccaactacggacagcaaaactctctgttgtgggctcccgatgcggctgggaaatacactgagcctagggctatcggtacccgctacctcacccaccacctgtaataa

SEQ ID NO: 54 - DNA, 2208 bp, Adeno-associated virus 4
  modified_base (750)..(750): a, c, t, or g
atgactgacggttaccttccagattggctagaggacaacctctctgaaggcgttcgagagtggtgggcgctgcaacctggagcccctaaacccaaggcaaatcaacaacatcaggacaacgctcggggtcttgtgcttccgggttacaaatacctcggacccggcaacggactcgacaagggggaacccgtcaacgcagcggacgcggcagccctcgagcacgacaaggcctacgaccagcagctcaaggccggtgacaacccctacctcaagtacaaccacgccgacgcggagttccagcagcggcttcagggcgacacatcgtttgggggcaacctcggcagagcagtcttccaggccaaaaagagggttcttgaacctcttggtctggttgagcaagcgggtgagacggctcctggaaagaagagaccgttgattgaatccccccagcagcccgactcctccacgggtatcggcaaaaaaggcaagcagccggctaaaaagaagctcgttttcgaagacgaaactggagcaggcgacggaccccctgagggatcaacttccggagccatgtctgatgacagtgagatgcgtgcagcagctggcggagctgcagtcgagggsggacaaggtgccgatggagtgggtaatgcctcgggtgattggcattgcgattccacctggtctgagggccacgtcacgaccaccagcaccagaacctgggtcttgcccacctacaacaaccacctntacaagcgactcggagagagcctgcagtccaacacctacaacggattctccaccccctggggatactttgacttcaaccgcttccactgccacttctcaccacgtgactggcagcgactcatcaacaacaactggggcatgcgacccaaagccatgcgggtcaaaatcttcaacatccaggtcaaggaggtcacgacgtcgaacggcgagacaacggtggctaataaccttaccagcacggttcagatctttgcggactcgtcgtacgaactgccgtacgtgatggatgcgggtcaagagggcagcctgcctccttttcccaacgacgtctttatggtgccccagtacggctactgtggactggtgaccggcaacacttcgcagcaacagactgacagaaatgccttctactgcctggagtactttccttcgcagatgctgcggactggcaacaactttgaaattacgtacagttttgagaaggtgcctttccactcgatgtacgcgcacagccagagcctggaccggctgatgaaccctctcatcgaccagtacctgtggggactgcaatcgaccaccaccggaaccaccctgaatgccgggactgccaccaccaactttaccaagctgcggcctaccaacttttccaactttaaaaagaactggctgcccgggccttcaatcaagcagcagggcttctcaaagactgccaatcaaaactacaagatccctgccaccgggtcagacagtctcatcaaatacgagacgcacagcactctggacggaagatggagtgccctgacccccggacctccaatggccacggctggacctgcggacagcaagttcagcaacagccagctcatctttgcggggcctaaacagaacggcaacacggccaccgtacccgggactctgatcttcacctctgaggaggagctggcagccaccaacgccaccgatacggacatgtggggcaacctacctggcggtgaccagagcaacagcaacctgccgaccgtggacagactgacagccttgggagccgtgcctggaatggtctggcaaaacagagacatttactaccagggtcccatttgggccaagattcctcataccgatggacactttcacccctcaccgctgattggtgggtttgggctgaaacacccgcctcctcaaatttttatcaagaacaccccggtacctgcgaatcctgcaacgaccttcagctctactccggtaaactccttcattactcagtacagcactggccaggtgtcggtgcagattgactgggagatccagaaggagcggtccaaacgctggaaccccgaggtccagtttacctccaactacggacagcaaaactctctgttgtgggctcccgatgcggctgggaaatacactgagcctagggctatcggtacccgctacctcacccaccacctgtaataa

SEQ ID NO: 55 - DNA, 1872 bp, Adeno-associated virus 4
atgccggggttctacgagatcgtgctgaaggtgcccagcgacctggacgagcacctgcccggcatttctgactcttttgtgagctgggtggccgagaaggaatgggagctgccgccggattctgacatggacttgaatctgattgagcaggcacccctgaccgtggccgaaaagctgcaacgcgagttcctggtcgagtggcgccgcgtgagtaaggccccggaggccctcttctttgtccagttcgagaagggggacagctacttccacctgcacatcctggtggagaccgtgggcgtcaaatccatggtggtgggccgctacgtgagccagattaaagagaagctggtgacccgcatctaccgcggggtcgagccgcagcttccgaactggttcgcggtgaccaagacgcgtaatggcgccggaggcgggaacaaggtggtggacgactgctacatccccaactacctgctccccaagacccagcccgagctccagtgggcgtggactaacatggaccagtatataagcgcctgtttgaatctcgcggagcgtaaacggctggtggcgcagcatctgacgcacgtgtcgcagacgcaggagcagaacaaggaaaaccagaaccccaattctgacgcgccggtcatcaggtcaaaaacctccgccaggtacatggagctggtcgggtggctggtggaccgcgggatcacgtcagaaaagcaatggatccaggaggaccaggcgtcctacatctccttcaacgccgcctccaactcgcggtcacaaatcaaggccgcgctggacaatgcctccaaaatcatgagcctgacaaagacggctccggactacctggtgggccagaacccgccggaggacatttccagcaaccgcatctaccgaatcctcgagatgaacgggtacgatccgcagtacgcggcctccgtcttcctgggctgggcgcaaaagaagttcgggaagaggaacaccatctggctctttgggccggccacgacgggtaaaaccaacatcgcggaagccatcgcccacgccgtgcccttctacggctgcgtgaactggaccaatgagaactttccgttcaacgattgcgtcgacaagatggtgatctggtgggaggagggcaagatgacggccaaggtcgtagagagcgccaaggccatcctgggcggaagcaaggtgcgcgtggaccaaaagtgcaagtcatcggcccagatcgacccaactcccgtgatcgtcacctccaacaccaacatgtgcgcggtcatcgacggaaactcgaccaccttcgagcaccaacaaccactccaggaccggatgttcaagttcgagctcaccaagcgcctggagcacgactttggcaaggtcaccaagcaggaagtcaaagactttttccggtgggcgtcagatcacgtgaccgaggtgactcacgagttttacgtcagaaagggtggagctagaaagaggcccgcccccaatgacgcagatataagtgagcccaagcgggcctgtccgtcagttgcgcagccatcgacgtcagacgcggaagctccggtggactacgcggacaggtaccaaaacaaatgttctcgtcacgtgggtatgaatctgatgctttttccctgccggcaatgcgagagaatgaatcagaatgtggacatttgcttcacgcacggggtcatggactgtgccgagtgcttccccgtgtcagaatctcaacccgtgtctgtcgtcagaaagcggacgtatcagaaactgtgtccgattcatcacatcatggggagggcgcccgaggtggcctgctcggcctgcgaactggccaatgtggacttggatgactgtgacatggaacaataa

SEQ ID NO: 56 - DNA, 1611 bp, Adeno-associated virus 4
atgccggggttctacgagatcgtgctgaaggtgcccagcgacctggacgagcacctgcccggcatttctgactcttttgtgagctgggtggccgagaaggaatgggagctgccgccggattctgacatggacttgaatctgattgagcaggcacccctgaccgtggccgaaaagctgcaacgcgagttcctggtcgagtggcgccgcgtgagtaaggccccggaggccctcttctttgtccagttcgagaagggggacagctacttccacctgcacatcctggtggagaccgtgggcgtcaaatccatggtggtgggccgctacgtgagccagattaaagagaagctggtgacccgcatctaccgcggggtcgagccgcagcttccgaactggttcgcggtgaccaagacgcgtaatggcgccggaggcgggaacaaggtggtggacgactgctacatccccaactacctgctccccaagacccagcccgagctccagtgggcgtggactaacatggaccagtatataagcgcctgtttgaatctcgcggagcgtaaacggctggtggcgcagcatctgacgcacgtgtcgcagacgcaggagcagaacaaggaaaaccagaaccccaattctgacgcgccggtcatcaggtcaaaaacctccgccaggtacatggagctggtcgggtggctggtggaccgcgggatcacgtcagaaaagcaatggatccaggaggaccaggcgtcctacatctccttcaacgccgcctccaactcgcggtcacaaatcaaggccgcgctggacaatgcctccaaaatcatgagcctgacaaagacggctccggactacctggtgggccagaacccgccggaggacatttccagcaaccgcatctaccgaatcctcgagatgaacgggtacgatccgcagtacgcggcctccgtcttcctgggctgggcgcaaaagaagttcgggaagaggaacaccatctggctctttgggccggccacgacgggtaaaaccaacatcgcggaagccatcgcccacgccgtgcccttctacggctgcgtgaactggaccaatgagaactttccgttcaacgattgcgtcgacaagatggtgatctggtgggaggagggcaagatgacggccaaggtcgtagagagcgccaaggccatcctgggcggaagcaaggtgcgcgtggaccaaaagtgcaagtcatcggcccagatcgacccaactcccgtgatcgtcacctccaacaccaacatgtgcgcggtcatcgacggaaactcgaccaccttcgagcaccaacaaccactccaggaccggatgttcaagttcgagctcaccaagcgcctggagcacgactttggcaaggtcaccaagcaggaagtcaaagactttttccggtgggcgtcagatcacgtgaccgaggtgactcacgagttttacgtcagaaagggtggagctagaaagaggcccgcccccaatgacgcagatataagtgagcccaagcgggcctgtccgtcagttgcgcagccatcgacgtcagacgcggaagctccggtggactacgcggacagattggctagaggacaacctctctga

SEQ ID NO: 57 - DNA, 1872 bp, Adeno-associated virus 4; identical to SEQ ID NO: 55

SEQ ID NO: 58 - DNA, 1617 bp, Adeno-associated virus 4
  modified_base (162)..(162): a, c, t, or g
atgcgtgcagcagctggcggagctgcagtcgagggsggacaaggtgccgatggagtgggtaatgcctcgggtgattggcattgcgattccacctggtctgagggccacgtcacgaccaccagcaccagaacctgggtcttgcccacctacaacaaccacctntacaagcgactcggagagagcctgcagtccaacacctacaacggattctccaccccctggggatactttgacttcaaccgcttccactgccacttctcaccacgtgactggcagcgactcatcaacaacaactggggcatgcgacccaaagccatgcgggtcaaaatcttcaacatccaggtcaaggaggtcacgacgtcgaacggcgagacaacggtggctaataaccttaccagcacggttcagatctttgcggactcgtcgtacgaactgccgtacgtgatggatgcgggtcaagagggcagcctgcctccttttcccaacgacgtctttatggtgccccagtacggctactgtggactggtgaccggcaacacttcgcagcaacagactgacagaaatgccttctactgcctggagtactttccttcgcagatgctgcggactggcaacaactttgaaattacgtacagttttgagaaggtgcctttccactcgatgtacgcgcacagccagagcctggaccggctgatgaaccctctcatcgaccagtacctgtggggactgcaatcgaccaccaccggaaccaccctgaatgccgggactgccaccaccaactttaccaagctgcggcctaccaacttttccaactttaaaaagaactggctgcccgggccttcaatcaagcagcagggcttctcaaagactgccaatcaaaactacaagatccctgccaccgggtcagacagtctcatcaaatacgagacgcacagcactctggacggaagatggagtgccctgacccccggacctccaatggccacggctggacctgcggacagcaagttcagcaacagccagctcatctttgcggggcctaaacagaacggcaacacggccaccgtacccgggactctgatcttcacctctgaggaggagctggcagccaccaacgccaccgatacggacatgtggggcaacctacctggcggtgaccagagcaacagcaacctgccgaccgtggacagactgacagccttgggagccgtgcctggaatggtctggcaaaacagagacatttactaccagggtcccatttgggccaagattcctcataccgatggacactttcacccctcaccgctgattggtgggtttgggctgaaacacccgcctcctcaaatttttatcaagaacaccccggtacctgcgaatcctgcaacgaccttcagctctactccggtaaactccttcattactcagtacagcactggccaggtgtcggtgcagattgactgggagatccagaaggagcggtccaaacgctggaaccccgaggtccagtttacctccaactacggacagcaaaactctctgttgtgggctcccgatgcggctgggaaatacactgagcctagggctatcggtacccgctacctcacccaccacctgtaa

SEQ ID NO: 59 - DNA, 939 bp, Adeno-associated virus 4
atggagctggtcgggtggctggtggaccgcgggatcacgtcagaaaagcaatggatccaggaggaccaggcgtcctacatctccttcaacgccgcctccaactcgcggtcacaaatcaaggccgcgctggacaatgcctccaaaatcatgagcctgacaaagacggctccggactacctggtgggccagaacccgccggaggacatttccagcaaccgcatctaccgaatcctcgagatgaacgggtacgatccgcagtacgcggcctccgtcttcctgggctgggcgcaaaagaagttcgggaagaggaacaccatctggctctttgggccggccacgacgggtaaaaccaacatcgcggaagccatcgcccacgccgtgcccttctacggctgcgtgaactggaccaatgagaactttccgttcaacgattgcgtcgacaagatggtgatctggtgggaggagggcaagatgacggccaaggtcgtagagagcgccaaggccatcctgggcggaagcaaggtgcgcgtggaccaaaagtgcaagtcatcggcccagatcgacccaactcccgtgatcgtcacctccaacaccaacatgtgcgcggtcatcgacggaaactcgaccaccttcgagcaccaacaaccactccaggaccggatgttcaagttcgagctcaccaagcgcctggagcacgactttggcaaggtcaccaagcaggaagtcaaagactttttccggtgggcgtcagatcacgtgaccgaggtgactcacgagttttacgtcagaaagggtggagctagaaagaggcccgcccccaatgacgcagatataagtgagcccaagcgggcctgtccgtcagttgcgcagccatcgacgtcagacgcggaagctccggtggactacgcggacagattggctagaggacaacctctctga

SEQ ID NO: 60 - DNA, 1197 bp, Adeno-associated virus 4
atggagctggtcgggtggctggtggaccgcgggatcacgtcagaaaagcaatggatccaggaggaccaggcgtcctacatctccttcaacgccgcctccaactcgcggtcacaaatcaaggccgcgctggacaatgcctccaaaatcatgagcctgacaaagacggctccggactacctggtgggccagaacccgccggaggacatttccagcaaccgcatctaccgaatcctcgagatgaacgggtacgatccgcagtacgcggcctccgtcttcctgggctgggcgcaaaagaagttcgggaagaggaacaccatctggctctttgggccggccacgacgggtaaaaccaacatcgcggaagccatcgcccacgccgtgcccttctacggctgcgtgaactggaccaatgagaactttccgttcaacgattgcgtcgacaagatggtgatctggtgggaggagggcaagatgacggccaaggtcgtagagagcgccaaggccatcctgggcggaagcaaggtgcgcgtggaccaaaagtgcaagtcatcggcccagatcgacccaactcccgtgatcgtcacctccaacaccaacatgtgcgcggtcatcgacggaaactcgaccaccttcgagcaccaacaaccactccaggaccggatgttcaagttcgagctcaccaagcgcctggagcacgactttggcaaggtcaccaagcaggaagtcaaagactttttccggtgggcgtcagatcacgtgaccgaggtgactcacgagttttacgtcagaaagggtggagctagaaagaggcccgcccccaatgacgcagatataagtgagcccaagcgggcctgtccgtcagttgcgcagccatcgacgtcagacgcggaagctccggtggactacgcggacaggtaccaaaacaaatgttctcgtcacgtgggtatgaatctgatgctttttccctgccggcaatgcgagagaatgaatcagaatgtggacatttgcttcacgcacggggtcatggactgtgccgagtgcttccccgtgtcagaatctcaacccgtgtctgtcgtcagaaagcggacgtatcagaaactgtgtccgattcatcacatcatggggagggcgcccgaggtggcctgctcggcctgcgaactggccaatgtggacttggatgactgtgacatggaacaa

SEQ ID NO: 61 - DNA, 245 bp, Adeno-associated virus 4
ctccatcatctaggtttgcccactgacgtcaatgtgacgtcctagggttagggaggtccctgtattagcagtcacgtgagtgtcgtatttcgcggagcgtagcggagcgcataccaagctgccacgtcacagccacgtggtccgtttgcgacagtttgcgacaccatgtggtcaggagggtatataaccgcgagtgagccagcgaggagctccattttgcccgcgaattttgaacgagcagcagc

SEQ ID NO: 62 - protein, 313 aa, Adeno-associated virus 4
  MOD_RES (313)..(313): Any amino acid
MELVGWLVDRGITSEKQWIQEDQASYISFNAASNSRSQIKAALDNASKIMSLTKTAPDYLVGQNPPEDISSNRIYRILEMNGYDPQYAASVFLGWAQKKFGKRNTIWLFGPATTGKTNIAEAIAHAVPFYGCVNWTNENFPFNDCVDKMVIWWEEGKMTAKVVESAKAILGGSKVRVDQKCKSSAQIDPTPVIVTSNTNMCAVIDGNSTTFEHQQPLQDRMFKFELTKRLEHDFGKVTKQEVKDFFRWASDHVTEVTHEFYVRKGGARKRPAPNDADISEPKRACPSVAQPSTSDAEAPVDYADRLARGQPLX

SEQ ID NO: 63 - protein, 399 aa, Adeno-associated virus 4
MELVGWLVDRGITSEKQWIQEDQASYISFNAASNSRSQIKAALDNASKIMSLTKTAPDYLVGQNPPEDISSNRIYRILEMNGYDPQYAASVFLGWAQKKFGKRNTIWLFGPATTGKTNIAEAIAHAVPFYGCVNWTNENFPFNDCVDKMVIWWEEGKMTAKVVESAKAILGGSKVRVDQKCKSSAQIDPTPVIVTSNTNMCAVIDGNSTTFEHQQPLQDRMFKFELTKRLEHDFGKVTKQEVKDFFRWASDHVTEVTHEFYVRKGGARKRPAPNDADISEPKRACPSVAQPSTSDAEAPVDYADRYQNKCSRHVGMNLMLFPCRQCERMNQNVDICFTHGVMDCAECFPVSESQPVSVVRKRTYQKLCPIHHIMGRAPEVACSACELANVDLDDCDMEQ

SEQ ID NO: 64 - protein, 623 aa, Adeno-associated virus 4
MPGFYEIVLKVPSDLDEHLPGISDSFVSWVAEKEWELPPDSDMDLNLIEQAPLTVAEKLQREFLVEWRRVSKAPEALFFVQFEKGDSYFHLHILVETVGVKSMVVGRYVSQIKEKLVTRIYRGVEPQLPNWFAVTKTRNGAGGGNKVVDDCYIPNYLLPKTQPELQWAWTNMDQYISACLNLAERKRLVAQHLTHVSQTQEQNKENQNPNSDAPVIRSKTSARYMELVGWLVDRGITSEKQWIQEDQASYISFNAASNSRSQIKAALDNASKIMSLTKTAPDYLVGQNPPEDISSNRIYRILEMNGYDPQYAASVFLGWAQKKFGKRNTIWLFGPATTGKTNIAEAIAHAVPFYGCVNWTNENFPFNDCVDKMVIWWEEGKMTAKVVESAKAILGGSKVRVDQKCKSSAQIDPTPVIVTSNTNMCAVIDGNSTTFEHQQPLQDRMFKFELTKRLEHDFGKVTKQEVKDFFRWASDHVTEVTHEFYVRKGGARKRPAPNDADISEPKRACPSVAQPSTSDAEAPVDYADRYQNKCSRHVGMNLMLFPCRQCERMNQNVDICFTHGVMDCAECFPVSESQPVSVVRKRTYQKLCPIHHIMGRAPEVACSACELANVDLDDCDMEQ

SEQ ID NO: 65 - protein, 537 aa, Adeno-associated virus 4
  MOD_RES (537)..(537): Any amino acid
MPGFYEIVLKVPSDLDEHLPGISDSFVSWVAEKEWELPPDSDMDLNLIEQAPLTVAEKLQREFLVEWRRVSKAPEALFFVQFEKGDSYFHLHILVETVGVKSMVVGRYVSQIKEKLVTRIYRGVEPQLPNWFAVTKTRNGAGGGNKVVDDCYIPNYLLPKTQPELQWAWTNMDQYISACLNLAERKRLVAQHLTHVSQTQEQNKENQNPNSDAPVIRSKTSARYMELVGWLVDRGITSEKQWIQEDQASYISFNAASNSRSQIKAALDNASKIMSLTKTAPDYLVGQNPPEDISSNRIYRILEMNGYDPQYAASVFLGWAQKKFGKRNTIWLFGPATTGKTNIAEAIAHAVPFYGCVNWTNENFPFNDCVDKMVIWWEEGKMTAKVVESAKAILGGSKVRVDQKCKSSAQIDPTPVIVTSNTNMCAVIDGNSTTFEHQQPLQDRMFKFELTKRLEHDFGKVTKQEVKDFFRWASDHVTEVTHEFYVRKGGARKRPAPNDADISEPKRACPSVAQPSTSDAEAPVDYADRLARGQPLX

SEQ ID NO: 66 - protein, 623 aa, Adeno-associated virus 4; identical to SEQ ID NO: 64

SEQ ID NO: 67 - protein, 544 aa, Adeno-associated virus 4
MSDDSEMRAAAGGAAVEGGQGADGVGNASGDWHCDSTWSEGHVTTTSTRTWVLPTYNNHLYKRLGESLQSNTYNGFSTPWGYFDFNRFHCHFSPRDWQRLINNNWGMRPKAMRVKIFNIQVKEVTTSNGETTVANNLTSTVQIFADSSYELPYVMDAGQEGSLPPFPNDVFMVPQYGYCGLVTGNTSQQQTDRNAFYCLEYFPSQMLRTGNNFEITYSFEKVPFHSMYAHSQSLDRLMNPLIDQYLWGLQSTTTGTTLNAGTATTNFTKLRPTNFSNFKKNWLPGPSIKQQGFSKTANQNYKIPATGSDSLIKYETHSTLDGRWSALTPGPPMATAGPADSKFSNSQLIFAGPKQNGNTATVPGTLIFTSEEELAATNATDTDMWGNLPGGDQSNSNLPTVDRLTALGAVPGMVWQNRDIYYQGPIWAKIPHTDGHFHPSPLIGGFGLKHPPPQIFIKNTPVPANPATTFSSTPVNSFITQYSTGQVSVQIDWEIQKERSKRWNPEVQFTSNYGQQNSLLWAPDAAGKYTEPRAIGTRYLTHHL

SEQ ID NO: 68 - protein, 734 aa, Adeno-associated virus 4
MTDGYLPDWLEDNLSEGVREWWALQPGAPKPKANQQHQDNARGLVLPGYKYLGPGNGLDKGEPVNAADAAALEHDKAYDQQLKAGDNPYLKYNHADAEFQQRLQGDTSFGGNLGRAVFQAKKRVLEPLGLVEQAGETAPGKKRPLIESPQQPDSSTGIGKKGKQPAKKKLVFEDETGAGDGPPEGSTSGAMSDDSEMRAAAGGAAVEGGQGADGVGNASGDWHCDSTWSEGHVTTTSTRTWVLPTYNNHLYKRLGESLQSNTYNGFSTPWGYFDFNRFHCHFSPRDWQRLINNNWGMRPKAMRVKIFNIQVKEVTTSNGETTVANNLTSTVQIFADSSYELPYVMDAGQEGSLPPFPNDVFMVPQYGYCGLVTGNTSQQQTDRNAFYCLEYFPSQMLRTGNNFEITYSFEKVPFHSMYAHSQSLDRLMNPLIDQYLWGLQSTTTGTTLNAGTATTNFTKLRPTNFSNFKKNWLPGPSIKQQGFSKTANQNYKIPATGSDSLIKYETHSTLDGRWSALTPGPPMATAGPADSKFSNSQLIFAGPKQNGNTATVPGTLIFTSEEELAATNATDTDMWGNLPGGDQSNSNLPTVDRLTALGAVPGMVWQNRDIYYQGPIWAKIPHTDGHFHPSPLIGGFGLKHPPPQIFIKNTPVPANPATTFSSTPVNSFITQYSTGQVSVQIDWEIQKERSKRWNPEVQFTSNYGQQNSLLWAPDAAGKYTEPRAIGTRYLTHHL

SEQ ID NO: 69 - protein, 598 aa, Adeno-associated virus 4
TAPGKKRPLIESPQQPDSSTGIGKKGKQPAKKKLVFEDETGAGDGPPEGSTSGAMSDDSEMRAAAGGAAVEGGQGADGVGNASGDWHCDSTWSEGHVTTTSTRTWVLPTYNNHLYKRLGESLQSNTYNGFSTPWGYFDFNRFHCHFSPRDWQRLINNNWGMRPKAMRVKIFNIQVKEVTTSNGETTVANNLTSTVQIFADSSYELPYVMDAGQEGSLPPFPNDVFMVPQYGYCGLVTGNTSQQQTDRNAFYCLEYFPSQMLRTGNNFEITYSFEKVPFHSMYAHSQSLDRLMNPLIDQYLWGLQSTTTGTTLNAGTATTNFTKLRPTNFSNFKKNWLPGPSIKQQGFSKTANQNYKIPATGSDSLIKYETHSTLDGRWSALTPGPPMATAGPADSKFSNSQLIFAGPKQNGNTATVPGTLIFTSEEELAATNATDTDMWGNLPGGDQSNSNLPTVDRLTALGAVPGMVWQNRDIYYQGPIWAKIPHTDGHFHPSPLIGGFGLKHPPPQIFIKNTPVPANPATTFSSTPVNSFITQYSTGQVSVQIDWEIQKERSKRWNPEVQFTSNYGQQNSLLWAPDAAGKYTEPRAIGTRYLTHHL

SEQ ID NO: 70 - DNA, 129 bp, Adeno-associated virus 4
ttggccactccctctatgcgcgctcgctcactcactcggccctgcggccagaggccggcagtctggagacctttggtgtccagggcagggccgagtgagtgagcgagcgcgcatagagggagtggccaa

SEQ ID NO: 71 - DNA, 125 bp, Adeno-associated virus 4
ttggccactccctctatgcgcgctcgctcactcactcggccctggagaccaaaggtctccagactgccggcctctggccggcagggccgagtgagtgagcgagcgcgcatagagggagtggccaa

SEQ ID NO: 72 - DNA, 4768 bp, Adeno-associated virus 4
  modified_base (3009)..(3009): a, c, t, or g
ttggccactccctctatgcgcgctcgctcactcactcggccctggagaccaaaggtctccagactgccggcctctggccggcagggccgagtgagtgagcgagcgcgcatagagggagtggccaactccatcatctaggtttgcccactgacgtcaatgtgacgtcctagggttagggaggtccctgtattagcagtcacgtgagtgtcgtatttcgcggagcgtagcggagcgcataccaagctgccacgtcacagccacgtggtccgtttgcgacagtttgcgacaccatgtggtcaggagggtatataaccgcgagtgagccagcgaggagctccattttgcccgcgaattttgaacgagcagcagccatgccggggttctacgagatcgtgctgaaggtgcccagcgacctggacgagcacctgcccggcatttctgactcttttgtgagctgggtggccgagaaggaatgggagctgccgccggattctgacatggacttgaatctgattgagcaggcacccctgaccgtggccgaaaagctgcaacgcgagttcctggtcgagtggcgccgcgtgagtaaggccccggaggccctcttctttgtccagttcgagaagggggacagctacttccacctgcacatcctggtggagaccgtgggcgtcaaatccatggtggtgggccgctacgtgagccagattaaagagaagctggtgacccgcatctaccgcggggtcgagccgcagcttccgaactggttcgcggtgaccaagacgcgtaatggcgccggaggcgggaacaaggtggtggacgactgctacatccccaactacctgctccccaagacccagcccgagctccagtgggcgtggactaacatggaccagtatataagcgcctgtttgaatctcgcggagcgtaaacggctggtggcgcagcatctgacgcacgtgtcgcagacgcaggagcagaacaaggaaaaccagaaccccaattctgacgcgccggtcatcaggtcaaaaacctccgccaggtacatggagctggtcgggtggctggtggaccgcgggatcacgtcagaaaagcaatggatccaggaggaccaggcgtcctacatctccttcaacgccgcctccaactcgcggtcacaaatcaaggccgcgctggacaatgcctccaaaatcatgagcctgacaaagacggctccggactacctggtgggccagaacccgccggaggacatttccagcaaccgcatctaccgaatcctcgagatgaacgggtacgatccgcagtacgcggcctccgtcttcctgggctgggcgcaaaagaagttcgggaagaggaacaccatctggctctttgggccggccacgacgggtaaaaccaacatcgcggaagccatcgcccacgccgtgcccttctacggctgcgtgaactggaccaatgagaactttccgttcaacgattgcgtcgacaagatggtgatctggtgggaggagggcaagatgacggccaaggtcgtagagagcgccaaggccatcctgggcggaagcaaggtgcgcgtggaccaaaagtgcaagtcatcggcccagatcgacccaactcccgtgatcgtcacctccaacaccaacatgtgcgcggtcatcgacggaaactcgaccaccttcgagcaccaacaaccactccaggaccggatgttcaagttcgagctcaccaagcgcctggagcacgactttggcaaggtcaccaagcaggaagtcaaagactttttccggtgggcgtcagatcacgtgaccgaggtgactcacgagttttacgtcagaaagggtggagctagaaagaggcccgcccccaatgacgcagatataagtgagcccaagcgggcctgtccgtcagttgcgcagccatcgacgtcagacgcggaagctccggtggactacgcggacaggtaccaaaacaaatgttctcgtcacgtgggtatgaatctgatgctttttccctgccggcaatgcgagagaatgaatcagaatgtggacatttgcttcacgcacggggtcatggactgtgccgagtgcttccccgtgtcagaatctcaacccgtgtctgtcgtcagaaagcggacgtatcagaaactgtgtccgattcatcacatcatggggagggcgcccgaggtggcctgctcggcctgcgaactggccaatgtggacttggatgactgtgacatggaacaataaatgactcaaaccagatatgactgacggttaccttccagattggctagaggacaacctctctgaaggcgttcgagagtggtgggcgctgcaacctggagcccctaaacccaaggcaaatcaacaacatcaggacaacgctcggggtcttgtgcttccgggttacaaatacctcggacccggcaacggactcgacaagggggaacccgtcaacgcagcggacgcggcagccctcgagcacgacaaggcctacgaccagcagctcaaggccggtgacaacccctacctcaagtacaaccacgccgacgcggagttccagcagcggcttcagggcgacacaccgtttgggggcaacctcggcagagcagtcttccaggccaaaaagagggttcttgaacctcttggtctggttgagcaagcgggtgagacggctcctggaaagaagagaccgttgattgaatccccccagcagcccgactcctccacgggtatcggcaaaaaaggcaagcagccggctaaaaagaagctcgttttcgaagacgaaactggagcaggcgacggaccccctgagggatcaacttccggagccatgtctgatgacagtgagatgcgtgcagcagctggcggagctgcagtcgagggsggacaaggtgccgatggagtgggtaatgcctcgggtgattggcattgcgattccacctggtctgagggccacgtcacgaccaccagcaccagaacctgggtcttgcccacctacaacaaccacctntacaagcgactcggagagagcctgcagtccaacacctacaacggattctccaccccctggggatactttgacttcaaccgcttccactgccacttctcaccacgtgactggcagcgactcatcaacaacaactggggcatgcgacccaaagccatgcgggtcaaaatcttcaacatccaggtcaaggaggtcacgacgtcgaacggcgagacaacggtggctaataaccttaccagcacggttcagatctttgcggactcgtcgtacgaactgccgtacgtgatggatgcgggtcaagagggcagcctgcctccttttcccaacgacgtctttatggtgccccagtacggctactgtggactggtgaccggcaacacttcgcagcaacagactgacagaaatgccttctactgcctggagtactttccttcgcagatgctgcggactggcaacaactttgaaattacgtacagttttgagaaggtgcctttccactcgatgtacgcgcacagccagagcctggaccggctgatgaaccctctcatcgaccagtacctgtggggactgcaatcgaccaccaccggaaccaccctgaatgccgggactgccaccaccaactttaccaagctgcggcctaccaacttttccaactttaaaaagaactggctgcccgggccttcaatcaagcagcagggcttctcaaagactgccaatcaaaactacaagatccctgccaccgggtcagacagtctcatcaaatacgagacgcacagcactctggacggaagatggagtgccctgacccccggacctccaatggccacggctggacctgcggacagcaagttcagcaacagccagctcatctttgcggggcctaaacagaacggcaacacggccaccgtacccgggactctgatcttcacctctgaggaggagctggcagccaccaacgccaccgatacggacatgtggggcaacctacctggcggtgaccagagcaacagcaacctgccgaccgtggacagactgacagccttgggagccgtgcctggaatggtctggcaaaacagagacatttactaccagggtcccatttgggccaagattcctcataccgatggacactttcacccctcaccgctgattggtgggtttgggctgaaacacccgcctcctcaaatttttatcaagaacaccccggtacctgcgaatcctgcaacgaccttcagctctactccggtaaactccttcattactcagtacagcactggccaggtgtcggtgcagattgactgggagatccagaaggagcggtccaaacgctggaaccccgaggtccagtttacctccaactacggacagcaaaactctctgttgtgggctcccgatgcggctgggaaatacactgagcctagggctatcggtacccgctacctcacccaccacctgtaataacctgttaatcaataaaccggtttattcgtttcagttgaactttggtctccgtgtccttcttatcttatctcgtttccatggctactgcgtacataagcagcggcctgcggcgcttgcgcttcgcggtttacaactgccggttaatcagtaacttctggcaaaccatgatgatggagttggccactccctctatgcgcgctcgctcactcactcggccctggagaccaaaggtctccagactgccggcctctggccggcagggccgagtgagtgagcgagcgcgcatagagggagtggccaa

SEQ ID NO: 73 - DNA, 3098 bp, Artificial Sequence
  source: /note="Description of Artificial Sequence: Synthetic polynucleotide"
gaattcgccctttctacggctgcgtcaactggaccaatgagaactttcccttcaacgattgcgtcgacaagatggtgatctggtgggaggagggcaagatgacggccaaggtcgtggagtccgccaaggccattctcggcggcagcaaggtgcgcgtggaccaaaagtgcaagtcttccgcccagatcgatcccacccccgtgatcgtcacttccaacaccaacatgtgcgctgtgattgacgggaacagcaccaccttcgagcaccagcagccgttacaagaccggatgttcaaatttgaactcacccgccgtctggagcacgactttggcaaggtgacaaagcaggaagtcaaagagttcttccgctgggcgcaggatcacgtgaccgaggtggcgcatgagttctacgtcagaaagggtggagccaacaagagacccgcccccgatgacgcggataaaagcgagcccaagcgggcctgcccctcagtcgcggatccatcgacgtcagacgcggaaggagctccggtggactttgccgacaggtaccaaaacaaatgttctcgtcacgcgggcatgcttcagatgctgtttccctgcaagacatgcgagagaatgaatcagaatttcaacatttgcttcacgcacgggaccagagactgttcagaatgtttccccggcgtgtcagaatctcaaccggtcgtcagaaagaggacgtatcggaaactctgtgccattcatcatctgctggggcgggctcccgagattgcttgctcggcctgcgatctggtcaacgtggacctggatgaccgtgtttctgagcaataaatgacttaaaccaggtatggctgccgatggttatcttccagattggctcgaggacaacctctctgagggcattcgcgagtggtgggacttgaaacctggagccccgaaacccaaagccaaccagcaaaagcaggacgacggccggggtctggtgcttcctggctacaagtacctcggacccttcaacggactcgacaagggagagccggtcaacgaggcagacgccgcggccctcgagcacgacaaggcctacgacaagcagctcgagcagggggacaacccgtacctcaagtacaaccacgccgacgccgagtttcaggagcgtcttcaagaagatacgtcttttgggggcaacctcgggcgagcagtcttccaggccaagaagcgggttctcgaacctctcggtctggttgaggaaggcgctaagacggctcctggaaagaagagacccatagaatcccccgactcctccacgggcatcggcaagaaaggccagcagcccgctaaaaagaagctcaactttgggcagactggcgactcagagtcagtgcccgacccccaacctctcggagaacctcccgccgcgccctcaggtctgggatctggtacaatggctgcaggcggtggcgcaccaatggcagacaataacgaaggcgccgacggagtgggtaatgcctccggaaattggcattgcgattccacatggctgggcgacagagtcatcaccaccagcacccgcacctgggccctgcccacctacaacaaccacctctacaagcagatatcaagtcagagcggggctaccaacgacaaccacttcttcggctacagcaccccctggggctattttgacttcaacagattccactgccacttctcaccacgtgactggcagcgactcatcaacaacaactggggattccggcccagaaagctgcggttcaagttgttcaacatccaggtcaaggaggtcacgacgaacgacggcgttacgaccatcgctaataaccttaccagcacgattcaggtcttctcggactcggagtaccaactgccgtacgtcctcggctctgcgcaccagggctgcctccctccgttccctgcggacgtgttcatgattcctcagtacggatatctgactctaaacaacggcagtcagtctgtgggacgttcctccttctactgcctggagtactttccttctcagatgctgagaacgggcaataactttgaattcagctacacctttgaggaagtgcctttccacagcagctatgcgcacagccagagcctggaccggctgatgaatcccctcatcgaccagtacctgtactacctggcccggacccagagcactacggggtccacaagggagctgcagttccatcaggctgggcccaacaccatggccgagcaatcaaagaactggctgcccggaccctgttatcggcagcagagactgtcaaaaaacatagacagcaacaacaacagtaactttgcctggaccggggccactaaataccatctgaatggtagaaattcattaaccaacccgggcgtagccatggccaccaacaaggacgacgaggaccagttctttcccatcaacggagtgctggtttttggcgaaacgggggctgccaacaagacaacgctggaaaacgtgctaatgaccagcgaggaggagatcaaaaccaccaatcccgtggctacagaagaatacggtgtggtctccagcaacctgcaatcgtctacggccggaccccagacacagactgtcaacagccagggggctctgcccggcatggtctggcagaaccgggacgtgtacctgcagggtcccatctgggccaaaattcctcacacggacggcaactttcacccgtctcccctgatgggcggatttggactcaaacacccgcctcctcaaattctcatcaaaaacaccccggtacctgctaatcctccagaggtgtttactcctgccaagtttgcctcatttatcacgcagtacagcaccggccaggtcagcgtggagatcgagtgggaactgcagaaagaaaacagcaaacgctggaatccagagattcagtacacctcaaattatgccaagtctaataatgtggaatttgctgtcaacaacgaaggggtttatactgagcctcgccccattggcacccgttacctcacccgtaacctgtaattgcctgttaatcaataaaccggttaattcgtttcagttgaactttggtctctgcgaagggcgaattc

SEQ ID NO: 74 - protein, 728 aa, Artificial Sequence
  source: /note="Description of Artificial Sequence: Synthetic polypeptide"
MAADGYLPDWLEDNLSEGIREWWDLKPGAPKPKANQQKQDDGRGLVLPGYKYLGPFNGLDKGEPVNEADAAALEHDKAYDKQLEQGDNPYLKYNHADAEFQERLQEDTSFGGNLGRAVFQAKKRVLEPLGLVEEGAKTAPGKKRPIESPDSSTGIGKKGQQPAKKKLNFGQTGDSESVPDPQPLGEPPAAPSGLGSGTMAAGGGAPMADNNEGADGVGNASGNWHCDSTWLGDRVITTSTRTWALPTYNNHLYKQISSQSGATNDNHFFGYSTPWGYFDFNRFHCHFSPRDWQRLINNNWGFRPRKLRFKLFNIQVKEVTTNDGVTTIANNLTSTIQVFSDSEYQLPYVLGSAHQGCLPPFPADVFMIPQYGYLTLNNGSQSVGRSSFYCLEYFPSQMLRTGNNFEFSYTFEEVPFHSSYAHSQSLDRLMNPLIDQYLYYLARTQSTTGSTRELQFHQAGPNTMAEQSKNWLPGPCYRQQRLSKNIDSNNNSNFAWTGATKYHLNGRNSLTNPGVAMATNKDDEDQFFPINGVLVFGETGAANKTTLENVLMTSEEEIKTTNPVATEEYGVVSSNLQSSTAGPQTQTVNSQGALPGMVWQNRDVYLQGPIWAKIPHTDGNFHPSPLMGGFGLKHPPPQILIKNTPVPANPPEVFTPAKFASFITQYSTGQVSVEIEWELQKENSKRWNPEIQYTSNYAKSNNVEFAVNNEGVYTEPRPIGTRYLTRNL

SEQ ID NO: 75 - DNA, 2495 bp, Artificial Sequence
  source: /note="Description of Artificial Sequence: Synthetic polynucleotide"
gaattcgccctttctacggctgcgtcaactagaccaatgagaactttcccttcaacgattgcgtcgacaagatggtgatctggtgggaggagggcaagatgacggccaaggtcgtggagtccgccaaggccattcatcatctgctggggcgggctcccgagattgcttgctcggcctgcgatctggtcaacgtggacctggatgactgtgtttctgagcaataaatgacttaaaccaggtatggctgccgatggttatcttccagattggctcgaggacaacctctctgagggcattcgcgagtggtgggacttgaaacctggagccccgaaacccaaagccaaccagcaaaagcaggacgacggccggggtctggtgcttcctggctacaagtacctcggacccttcaacggactcgacaagggagagccggtcaacgaggcagacgccgcggccctcgagcacgacaaggcctacgacaagcagctcgagcagggggacaacccgtacctcaagtacaaccacgccgacgccgagtttcaggagcgtcttcaagaagatacgtcttttgggggcaacctcgggcgagcagtcttccaggccaagaagcgggttctcgaacctctcggtctggttgaggaaggcgctaagacggctcctggaaagaagagacccatagaatcccccgactcctccacgggcatcggcaagaaaggccagcagcccgctaaaaagaagctcaactttgggcagactggcgactcagagtcagtgcccgaccctcaaccaatcggagaaccccccgcaggcccctctggtctgggatctggtacaatggctgcaggcggtggcgctccaatggcagacaataacgaaggcgccgacggagtgggtaatgcctccggaaattggcattgcgattccacatggctgggcgacagagtcatcaccaccagcacccgcacctgggccctgcccacctacaacaaccacctctacaagcagatatcaagtcagagcggggctaccaacgacaaccacttcttcggctacagcaccccctggggctattttgacttcaacagattccactgccacttctcaccacgtgactggcagcgactcatcaacaacaactggggattccggcccagaaagctgcggttcaagttgttcaacatccaggtcaaggaggtcacgacgaacgacggcgttacgaccatcgctaataaccttaccagcacgattcaggtcttctcggactcggagtaccaactgccgtacgtcctcggctctgcgcaccagggctgcctccctccgttccctgcggacgtgttcatgattcctcagtacggatatctgactctaaacaacggcagtcagtctgtgggacgttcctccttctactgcctggagtactttccttctcagatgctgagaacgggcaataactttgaattcagctacacctttgaggaagtgcctttccacagcagctatgcgcacagccagagcctggaccggctgatgaatcccctcatcgaccagtacctgtactacctggcccggacccagagcactacggggtccacaagggagctgcagttccatcaggctgggcccaacaccatggccgagcaatcaaagaactggctgcccggaccctgttatcggcagcagagactgtcaaaaaacatagacagcaacaacaccagtaactttgcctggaccggggccactaaataccatctgaatggtagaaattcattaaccaacccgggcgtagccatggccaccaacaaggacgacgaggaccagttctttcccatcaacggagtgctggtttttggcaaaacgggggctgccaacaagacaacgctggaaaacgtgctaatgaccagcgaggaggagatcaaaaccaccaatcccgtggctacagaacagtacggtgtggtctccagcaacctgcaatcgtctacggccggaccccagacacagactgtcaacagccagggggctctgcccggcatggtctggcagaaccgggacgtgtacctgcagggtcccatctgggccaaaattcctcacacggacggcaactttcacccgtctcccctgatgggcggatttggactcaaacacccgcctcctcaaattctcatcaaaaacaccccggtacctgctaatcctccagaggtgtttactcctgccaagtttgcctcatttatcacgcagtacagcaccggccaggtcagcgtggagatcgagtgggaactgcagaaagaaaacagcaaacgctggaatccagagattcagtacacctcaaattatgccaagtctaataatgtggaatttgctgtcaacaacgaaggggtttatactgagcctcgccccattggcacccgttacctcacccgtaacctgtaattgcctgttaatcaataaaccggttaattcgtttcagttgaactttggtctctgcgaagggcgaattc

SEQ ID NO: 76 - protein, 728 aa, Artificial Sequence
  source: /note="Description of Artificial Sequence: Synthetic polypeptide"
MAADGYLPDWLEDNLSEGIREWWDLKPGAPKPKANQQKQDDGRGLVLPGYKYLGPFNGLDKGEPVNEADAAALEHDKAYDKQLEQGDNPYLKYNHADAEFQERLQEDTSFGGNLGRAVFQAKKRVLEPLGLVEEGAKTAPGKKRPIESPDSSTGIGKKGQQPAKKKLNFGQTGDSESVPDPQPIGEPPAGPSGLGSGTMAAGGGAPMADNNEGADGVGNASGNWHCDSTWLGDRVITTSTRTWALPTYNNHLYKQISSQSGATNDNHFFGYSTPWGYFDFNRFHCHFSPRDWQRLINNNWGFRPRKLRFKLFNIQVKEVTTNDGVTTIANNLTSTIQVFSDSEYQLPYVLGSAHQGCLPPFPADVFMIPQYGYLTLNNGSQSVGRSSFYCLEYFPSQMLRTGNNFEFSYTFEEVPFHSSYAHSQSLDRLMNPLIDQYLYYLARTQSTTGSTRELQFHQAGPNTMAEQSKNWLPGPCYRQQRLSKNIDSNNTSNFAWTGATKYHLNGRNSLTNPGVAMATNKDDEDQFFPINGVLVFGKTGAANKTTLENVLMTSEEEIKTTNPVATEQYGVVSSNLQSSTAGPQTQTVNSQGALPGMVWQNRDVYLQGPIWAKIPHTDGNFHPSPLMGGFGLKHPPPQILIKNTPVPANPPEVFTPAKFASFITQYSTGQVSVEIEWELQKENSKRWNPEIQYTSNYAKSNNVEFAVNNEGVYTEPRPIGTRYLTRNL

SEQ ID NO: 77 - DNA, 2504 bp, Artificial Sequence
  source: /note="Description of Artificial Sequence: Synthetic polynucleotide"
gaattcgccctttctacggctgcgtcaactggaccaatgagaactttcccttcaacgattgcgtcgacaagatggtgatctggtgggaggagggcaagatgacggccaaggtcgtggagtccgccaaggccattcatcatctgctggggcgggctcccgagattgcttgctcggcctgcgatctggtcaacgtggacctggatgactgtgtttctgagcaataaatgacttaaaccaggtatggctgccgatggttatcttccagattggctcgaggacaacctctctgagggcattcgcgagtggtgggacttgaaacctggagccccgaaacccaaagccaaccagcaaaagcaggacgacggccggggtctggtgcttcctggctacaagtacctcggacccttcaacggactcgacaagggagagccggtcaacgaggcagacgccgcggccctcgagcacgacaaggcctacgacaagcagctcgagcagggggacaacccgtacctcaagtacaaccacgccgacgccgagtttcaggagcgtcttcaagaagatacgtcttttgggggcaacctcgggcgagcagtcttccaggccaagaagcgggttctcgaacctctcggtctggttgaggaaggcgctaagacggctcctggaaagaagagacccatagaatcccccgactcctccacgggcatcggcaagaaaggccagcagcccgctaaaaagaagctcaactttgggcagactggcgactcagagtcagtgcccgaccctcaaccaatcggagaaccccccgcaggcccctctggtctgggatctggtacaatggctgcaggcggtggcgctccaatggcagacaataacgaaggcgccgacggagtgggtaatgcctccggaaattggcattgcgattccacatggctgggcgacagagtcatcaccaccagcacccgcacctgggccctgcccacctacaacaaccacctctacaagcagatatcaagtcagagcggggctaccaacgacaaccacttcttcggctacagcaccccctggggctattttgacttcaacagattccactgccacttctcatcacgtgactggcagcgactcatcaacaacaactggggattccggcccaagagactcaacttcaagctcttcaacatccaggtcaaggaggtcacgcagaatgaaggcaccaagaccatcgccaataaccttaccagcacgattcaggtctttacggactcggaataccggctcccgtacgtcctcggctctgcgcaccagggctgcctgcctccgttcccggcggacgtcttcatgattcctcagtacgggtacctgactctgaacaacggcagtcaggccgtgggccgttcctccttctactgcctggagtactttccttctcaaatgctgagaacgggcaacaactttgagttcagctaccagtttgaggacgtgccttttcacagcagctacgcgcacagccaaagcctggaccggctgatgaaccccctcatcgaccagtacctgtactacctgtctcggactcagtccacgggaggtaccgcaggaactcagcagttgctattttctcaggccgggcctaataacatgtcggctcaggccaaaaactggctacccgggccctgctaccggcagcaacgcgtctccacgacactgtcgcaaaataacaacagcaactttgcttggaccggtgccaccaagtatcatctgaatggcagagactctctggtaaatcccggtgtcgctatggcaacgcacaaggacgacgaagagcgattttttccatccagcggagtcttgatgtttgggaaacagggagctggaaaagacaacgtggactatagcagcgttatgctaaccagtgaggaagaaatcaaaaccaccaacccagtggccacagaacagtacggcgtggtggccgataacctgcaacagcaaaacgccgctcctattgtaggggccgtcaacagtcaaggagccttacctggcatggtctggcagaaccgggacgtgtacctgcagggtcctatctgggccaagattcctcacacggacggcaactttcatccttcgccgctgatgggaggctttggactgaaacacccgcctcctcagatcctgattaagaatacacctgttcccgcggatcctccaactaccttcagtcaagccaagccggcgtcgttcatcacgcagtacagcaccggacaggtcagcgtggaaattgaatgggagctgcagaaagagaacagcaagcgctggaacccagagattcagtatacttccaactactacaaatctacaaatgtggactttgctgtcaatactgagggtacttattcagagcctcgccccattggcacccgttacctcacccgtaacctgtaattgcctgttaatcaataaaccggttaattcgtttcagttgaactttggtctctgcgaagggcgaattc

SEQ ID NO: 78 - protein, 731 aa, Artificial Sequence
  source: /note="Description of Artificial Sequence: Synthetic polypeptide"
MAADGYLPDWLEDNLSEGIREWWDLKPGAPKPKANQQKQDDGRGLVLPGYKYLGPFNGLDKGEPVNEADAAALEHDKAYDKQLEQGDNPYLKYNHADAEFQERLQEDTSFGGNLGRAVFQAKKRVLEPLGLVEEGAKTAPGKKRPIESPDSSTGIGKKGQQPAKKKLNFGQTGDSESVPDPQPIGEPPAGPSGLGSGTMAAGGGAPMADNNEGADGVGNASGNWHCDSTWLGDRVITTSTRTWALPTYNNHLYKQISSQSGATNDNHFFGYSTPWGYFDFNRFHCHFSSRDWQRLINNNWGFRPKRLNFKLFNIQVKEVTQNEGTKTIANNLTSTIQVFTDSEYRLPYVLGSAHQGCLPPFPADVFMIPQYGYLTLNNGSQAVGRSSFYCLEYFPSQMLRTGNNFEFSYQFEDVPFHSSYAHSQSLDRLMNPLIDQYLYYLSRTQSTGGTAGTQQLLFSQAGPNNMSAQAKNWLPGPCYRQQRVSTTLSQNNNSNFAWTGATKYHLNGRDSLVNPGVAMATHKDDEERFFPSSGVLMFGKQGAGKDNVDYSSVMLTSEEEIKTTNPVATEQYGVVADNLQQQNAAPIVGAVNSQGALPGMVWQNRDVYLQGPIWAKIPHTDGNFHPSPLMGGFGLKHPPPQILIKNTPVPADPPTTFSQAKPASFITQYSTGQVSVEIEWELQKENSKRWNPEIQYTSNYYKSTNVDFAVNTEGTYSEPRPIGTRYLTRNL

SEQ ID NO: 79 - DNA, 3128 bp, Artificial Sequence
  source: /note="Description of Artificial Sequence: Synthetic polynucleotide"
gaattcgccctttctacggctgcgtcaactggaccaatgagaactttcccttcaacgattgcgtcgacaagatggtgatctggtgggaggagggcaagatgacggccaaggtcgtggagtccgccaaggccattctcggcggcagcaaggtgcgcgtggaccaaaagtgcaagtcttccgcccagatcgatcccacccccgtgatcgtcacttccaacaccaacatgtgcgccgtgattgacgggaacagcaccaccttcgagcaccagcagccgttacaagaccggatgttcaaatttgaactcacccgccgtctggagcacgactttggcaaggtgacaaagcaggaagtcaaagagttcttccgctgggcgcaggatcacgtgaccgaggtggcgcatgagttctacgtcagaaagggtggagccaacaagagacccgcccccgatgacgcggataaaagcgagcccaagcgggcctgcccctcagtcgcggatccatcgacgtcagacgcggaaggagctccggtggactttgccgacaggtaccaaaacaaatgttctcgtcacgcgggcatgcttcagatgctgtttccctgcaagacatgcgagagaatgaatcagaatttcaacatttgcttcacgcacgggaccagagactgttcagaatgtttccccggcgtgtcagaatctcaaccggtcgtcagaaagaggacgtatcggaaactctgtgccattcatcatctgctagggcgggctcccgagattgcttgctcggcctgcgatctggtcaacgtggacctggatgactgtgtttctgagcaataaatgacttaaaccaggtatggctgccgatggttatcttccagattggctcgaggacaacctctctgagggcattcgcgagtggtgggacttgaaacctggagccccgaaacccaaagccaaccagcaaaagcaggacgacggccggggtctggtgcttcctggctacaagtacctcggacccttcaacggactcgacaagggggagcccgtcaacgcggcggacgcagcggccctcgagcacgacaaggcctacgaccagcagctcaaagcgggtgacaatccgtacctgcggtataaccacgccgacgccgagtttcaggagcgtctgcaagaagatacgtcttttgggggcaacctcgggcgagcagtcttccaggccaagaagcgggttctcgaacctctcggtctggttgaggaaggcgctaagacggctcctggaaagaagagaccggtagagccatcaccccagcgttctccagactcctctacgggcatcggcaagacaggccagcagcccgcgaaaaagagactcaactttgggcagactggcgactcagagtcagtgcccgaccctcaaccaatcggagaaccccccgcaggcccctctggtctgggatctggtacaatggctgcaggcggtggcgctccaatggcagacaataacgaaggcgccgacggagtgggtagttcctcaggaaattggcattgcgattccacatggctgggcgacagagtcatcaccaccagcacccgaacctgggccctccccacctacaacaaccacctctacaagcaaatctccaacgggacatcgggaggaagcaccaacgacaacacctacttcggctacagcaccccctgggggtattttgactttaacagattccactgccacttctcaccacgtgactggcagcgactcatcaacaacaactggggattccggcccaagagactcaacttcaagctcttcaacatccaggtcaaggaggtcacgcagaatgaaggcaccaagaccatcgccaataaccttaccagcacgattcaggtctttacggactcggaataccagctcccgtacgtcctcggctctgcgcaccagggctgcctgcctccgttcccggcggacgtcttcatgattcctcagtacgggtacctgactctgaacaacggcagtcaggccgtgggccgttcctccttctactgcctggagtactttccttctcaaatgctgagaacgggcaacaactttgagttcagctaccagtttgaggacgtgccttttcacagcagctacgcgcacagccaaagcctggaccggctgatgaaccccctcatcgaccagtacctgtactacctgtctcggactcagtccacgggaggtaccgcaggaactcagcagttgctattttctcaggccgggcctaataacatgtcggctcaggccaaaaactggctacccgggccctgctaccggcagcaacgcgtctccacgacactgtcgcaaaataacaacagcaactttgcttggaccggtgccaccaagtatcatctgaatggcagagactctctggtaaatcccggtgtcgctatggcaacgcacaaggacgacgaagagcgattttttccatccagcggagtcttgatgtttgggaaacagggagctggaaaagacaacgtggactatagcagcgttatgctaaccagtgaggaagaaatcaaaaccaccaacccagtggccacagaacagtacggcgtggtggccgataacctgcaacagcaaaacgccgctcctattgtaggggccgtcaacagtcaaggagccttacctggcatggtctggcagaaccgggacgtgtacctgcagggtcctatctgggccaagattcctcacacggacggcaactttcatccttcgccgctgatgggaggctttggactgaaacacccgcctcctcagatcctgattaagaatacacctgttcccgcggatcctccaactaccttcagtcaagccaagctggcgtcgttcatcacgcagtacagcaccggacaggtcagcgtggaaattgaatgggagctgcagaaagagaacagcaagcgctggaacccagagattcagtatacttccaactactacaaatctacaaatgtggactttgctgtcaatactgagggtacttattcagagcctcgccccattggcacccgttacctcacccgtaacctgtaattgcctgttaatcaataaaccggctaattcgtttcagttgaactttggtctctgcgaagggcgaattc

SEQ ID NO: 80 - protein, 738 aa, Artificial Sequence
  source: /note="Description of Artificial Sequence: Synthetic polypeptide"
MAADGYLPDWLEDNLSEGIREWWDLKPGAPKPKANQQKQDDGRGLVLPGYKYLGPFNGLDKGEPVNAADAAALEHDKAYDQQLKAGDNPYLRYNHADAEFQERLQEDTSFGGNLGRAVFQAKKRVLEPLGLVEEGAKTAPGKKRPVEPSPQRSPDSSTGIGKTGQQPAKKRLNFGQTGDSESVPDPQPIGEPPAGPSGLGSGTMAAGGGAPMADNNEGADGVGSSSGNWHCDSTWLGDRVITTSTRTWALPTYNNHLYKQISNGTSGGSTNDNTYFGYSTPWGYFDFNRFHCHFSPRDWQRLINNNWGFRPKRLNFKLFNIQVKEVTQNEGTKTIANNLTSTIQVFTDSEYQLPYVLGSAHQGCLPPFPADVFMIPQYGYLTLNNGSQAVGRSSFYCLEYFPSQMLRTGNNFEFSYQFEDVPFHSSYAHSQSLDRLMNPLIDQYLYYLSRTQSTGGTAGTQQLLFSQAGPNNMSAQAKNWLPGPCYRQQRVSTTLSQNNNSNFAWTGATKYHLNGRDSLVNPGVAMATHKDDEERFFPSSGVLMFGKQGAGKDNVDYSSVMLTSEEEIKTTNPVATEQYGVVADNLQQQNAAPIVGAVNSQGALPGMVWQNRDVYLQGPIWAKIPHTDGNFHPSPLMGGFGLKHPPPQILIKNTPVPADPPTTFSQAKLASFITQYSTGQVSVEIEWELQKENSKRWNPEIQYTSNYYKSTNVDFAVNTEGTYSEPRPIGTRYLTRNL

SEQ ID NO: 81 - DNA, 3084 bp, Artificial Sequence
  source: /note="Description of Artificial Sequence: Synthetic polynucleotide"
gaattcgccctttctacggctgcatcaactggaccaatgagaactttcccttcaacgattgcgtcgacaagatggtgatctggtgggaggagggcaagatgacggccaaggtcgtggagtccgccaaggccattctcggcggcagcaaggtgcgcgtggaccaaaagtgcaagtcgtccgcccagatcgaccccacccccgtgatcgtcacctccaacaccaacatgtgcgccgtgattgacgggaacagcaccaccttcgagcaccagcagccgttgcaggaccggatgttcaagttcgaactcacccgccgtctggagcacgactttggcaaggtgaccaagcaggaagtcaaagagttcttccgctgggcgcaggatcacgtgaccgaggtggcgcatgagttctacgtcagaaagggcggagccagcaaaagacccgcccccgatgacgcggatataagcgagcccaagcgggcctgcccctcagtcgcggatccatcgacgtcagacgcggaaggagctccggtggactttgccgacaggtaccaaaacaaatgttctcgtcacgcgggcatgcttcagatgctgtttccctgcaaaacgtgcgagaaaatgaatcagaatttcaacatttgcttcacgcacggggtcagagactgctcagaatgtttccccggtgcatcagaatctcaaccggtcgtcagaaaaaaaacgtatcagaaactgtgtgccattcatcatctgctggggcgggcacccgagattgcttgctcggcctgcgatctggtcaacgtggacctggacgactgtgtttctgagcaataaatgacttaaaccaggtatggctgccgatggttatcttccagattggcttgaggacaacctctctgagggcattcgcgagtggtgggacctgaaacctggagccccgaaacccaaagccaaccagcaaaagcaggacgacggccggggtctggtgcttcctggctacaagtacctcggacccttcaacggactcgacaagggggagcccgtcaacgcggcggacgcagcggccctcgagcacgacaaggcctacgaccagcagctcaaagcgggtgacaatccgtacctgcggtataaccacgccgacgccgagtttcaggagcgtctgcaagaagatacgtcttttgggggcaacctcgggcgagcagtcttccaggccaagaagcgggttctcgaacctctcggtctggttgaggaaggcgctaagacggctcctggaaagaagagaccggtagagccatcacctcagcgttcccccgactcctccacgggcatcggcaagaaaggccaccagcccgcgagaaagagactgaactttgggcagactggcgactcggagtcagtccccgaccctcaaccaatcggagaaccaccagcaggcccctctggtctgggatctggtacaatggctgcaggcggtggcgctccaatggcagacaataacgaaggcgccgacggagtgggtagttcctcaggaaattggcattgcgattccacatggctgggcgacagagtcatcaccaccagcacccgaacctgggccctgcccacctacaacaaccatctctacaagcaaatctccaacgggacatcgggaggaagcactaacgacaacacctactttggctacagcaccccctgggggtattttgacttcaacagattccactgccacttctcaccacgtgactggcagcgactcatcaacaataactggggattccggcccaagagactcaacttcaagctcttcaacatccaggtcaaggaggtcacgcagaatgaaggcaccaagaccatcgccaataaccttaccagcacgattcaggtgtttacggactcggaataccagctcccgtacgtccccggctctgcgcaccagggctgcctccctccgttcccggcggacgtcttcatgattcctcagtacgggtatctgaccctaaacaatggcagtcaggctgtgggccgttcctccttctactgcctggaatacttcccttctcaaatgctgaggacgggcaacaactttgaattcagctacaccttcgaggacgtgcctttccacagcagctacgcgcacagccagagcctggaccggctgatgaaccctctcatcgaccagtacctgtattacttatccagaactcagtccacaggaggaactcaaggtactcagcaattgttattttctcaagccgggcccgcaaacatgtcggctcaggccaagaactggctacctggaccgtgttaccgtcagcaacgagtttccacgacactgtcgcaaaacaacaacagcaattttgcttggaccggtgccaccaagtatcacctgaatggcagagactccctggttaatcccggcgttgccatggctacccacaaggacgacgaggagcgcttcttcccgtcaagcggagttctaatgtttggcaagcagggggctggaaaagacaatgtggactacagcagcgtgatgctcaccagcgaagaagaaattaaaactactaacccagtggctacagagcagtatggtgtggtggcagacaacctgcagcagaccaacggagctcccattgtgggaactgtcaacagccagggggccttacctggtatggtctggcaaaaccgggacgtgtacctgcagggccccatctgggccaaaattcctcacacggacggcaactttcatccttcgccgctgatgggaggctttggactgaaacacccgcctcctcagatcctggtgaaaaacactcctgttcctgcggatcctccgaccaccttcagccaggccaagctggcttcttttatcacgcagtacagcaccggacaggtcagcgtggaaatcgaatgggagctgcagaaagaaaacagcaagcgctggaacccagagattcagtatacttccaactactacaaatctacaaatgtggactttgctgtcaatactgagggtacttattcagagcctcgccccattggcactcgttatctcacccgtaatctgtaattgcttgttaatcaataaaccggt

SEQ ID NO: 82 - protein, 738 aa, Artificial Sequence
  source: /note="Description of Artificial Sequence: Synthetic polypeptide"
MAADGYLPDWLEDNLSEGIREWWDLKPGAPKPKANQQKQDDGRGLVLPGYKYLGPFNGLDKGEPVNAADAAALEHDKAYDQQLKAGDNPYLRYNHADAEFQERLQEDTSFGGNLGRAVFQAKKRVLEPLGLVEEGAKTAPGKKRPVEPSPQRSPDSSTGIGKKGHQPARKRLNFGQTGDSESVPDPQPIGEPPAGPSGLGSGTMAAGGGAPMADNNEGADGVGSSSGNWHCDSTWLGDRVITTSTRTWALPTYNNHLYKQISNGTSGGSTNDNTYFGYSTPWGYFDFNRFHCHFSPRDWQRLINNNWGFRPKRLNFKLFNIQVKEVTQNEGTKTIANNLTSTIQVFTDSEYQLPYVPGSAHQGCLPPFPADVFMIPQYGYLTLNNGSQAVGRSSFYCLEYFPSQMLRTGNNFEFSYTFEDVPFHSSYAHSQSLDRLMNPLIDQYLYYLSRTQSTGGTQGTQQLLFSQAGPANMSAQAKNWLPGPCYRQQRVSTTLSQNNNSNFAWTGATKYHLNGRDSLVNPGVAMATHKDDEERFFPSSGVLMFGKQGAGKDNVDYSSVMLTSEEEIKTTNPVATEQYGVVADNLQQTNGAPIVGTVNSQGALPGMVWQNRDVYLQGPIWAKIPHTDGNFHPSPLMGGFGLKHPPPQILVKNTPVPADPPTTFSQAKLASFITQYSTGQVSVEIEWELQKENSKRWNPEIQYTSNYYKSTNVDFAVNTEGTYSEPRPIGTRYLTRNL

SEQ ID NO: 83 - DNA, 3123 bp, Artificial Sequence
  source: /note="Description of Artificial Sequence: Synthetic polynucleotide"
gaattcgcccttggctgcgtcaactggaccaatgagaactttcccttcaacgattgcgtcgacaagatggtgatctggtgggaggagggcaagatgacggccaaggtcgtggagtccgccaaggccattctcggcggcagcaaggtgcgcgtggaccaaaagtgcaagtcgtccgcccagatcgaccccacccccgtgatcgtcacctccaacaccaacatgtgcgccgtgattgacgggaacagcaccaccttcgagcaccagcagccgttgcaggaccggatgttcaagttcgaactcacccgccgtctggagcacgactttggcaaggtgaccaagcaggaagtcaaagagttcttccgctgggcgcaggatcacgtgaccgaggtggcgcatgagttctacgtcagaaagggcggagccagcaaaagacccgcccccgatgacgcggatataagcgagcccaagcgggcctgcccctcagtcgcggatccatcgacgtcagacgcggaaggagctccggtggactttgccgacaggtaccaaaacaaatgttctcgtcacgcgggcatgctccagatgctgtttccctgcaaaacgtgcgagagaatgaatcagaatttcaacatttgcttcacgcacggggtcagagactgctcagaatgtttccccggtgcatcagaatctcaaccggtcgtcagaaaaaaaacgtatcagaaactgtgtgccattcatcatctgctggggcgggcacccgagattgcttgctcggcctgcgatctggtcaacgtggacctggacgactgtgtttctgagcaataaatgacttaaaccaggtatggctgccgatggttatcttccagattggcttgaggacaacctctctgagggcattcgcgagtggtgggacctgaaacctggagccccgaaacccaaagccaaccagcaaaagcaggacgacggccggggtctggtgcttcctggctacaagtacctcggacccttcaacggactcgacaagggggagcccgtcaacgcggcggacgcagcggccctcgagcacgacaaggcctacgaccagcagctcaaagcgggtgacaatccgtacctgcggtataaccacgccgacgccgagtttcaggagcgtctgcaagaagatacgtcttttgggggcaacctcgggcgagcagtcttccaggccaagaagcgggttctcgaacctctcggtctggttgaggaaggcgctaagacggctcctggaaagaagagaccggtagagccatcacctcagcgttcccccgactcctccacgggcatcggcaagaaaggccaccagcccgcgagaaagagactgaactttgggcagactggcgactcggagtcagtccccgaccctcaaccaatcggagaaccaccagcaggcccctctggtctgggatctggtacaatggctgcaggcggtggcgctccaatggcagacaataacgaaggcgccgacggagtgggtagttcctcaggaaattggcattgcgattccacatggctgggcgacagagtcatcaccaccagcacccgaacctgggccctgcccacctacaacaaccatctctacaagcaaatctccaacgggacatcgggaggaagcactaacgacaacacctactttggctacagcaccccctgggggtattttgacttcaacagattccactgccacttctcaccacgtgactggcagcgactcatcaacaataactggggattccggcccaagagactcaacttcaagctcttcaacatccaggtcaaggaggtcacgcagaatgaaggcaccaagaccatcgccaataaccttaccagcacgattcaggtgtttacggactcggaataccagctcccgtacgtcctcggctctgcgcaccagggctgcctccctccgttcccggcggacgtcttcatgattcctcagtacgggtatctgaccctaaacaatggcagtcaggctgtgggccgttcctccttctactgcctggaatacttcccttctcaaatgctgaggacgggcaacaactttgaattcagctacaccttcgaggacgtgcctttccacagcagctacgcgcacagccagagcctggaccggctgatgaaccctctcatcgaccagtacctgtattacttatccagaactcagtccacaggaggaactcaaggtactcagcaattgttattttctcaagccgggcccgcaaacatgtcggctcaggccaagaactggctacctggaccgtgttaccgtcagcaacgagtttccacgacactgtcgcaaaacaacaacagcaattttgcttggaccggtgccaccaagtatcacctgaatggcagagactccctggttaatcccggcgttgccatggctacccacaaggacgacgaggagcgcttcttcccgtcaagcggagttctaatgtttggcaagcagggggctggaaaagacaatgtggactacagcagcgtgatgctcaccagcgaagaagaaattaaaactactaacccagtggctacagagcagtatggtgtggtggcagacaacctgcagcagaccaacggagctcccattgtgggaactgtcaacagccagggggccttacctggtatggtctggcaaaaccgggacgtgtacctgcagggccccatctgggccaaaattcctcacacggacggcaactttcatccttcgccgctgatgggaggctttggactgaaacacccgcctcctcagatcctggtgaaaaacactcctgttcctgcggatcctccgaccaccttcagccaggccaagctggcttcttttatcacgcagtacagcaccggacaggtcagcgtggaaatcgaatgggagctgcagaaagaaaacagcaagcgctggaacccagagattcagtatacttccaactactacaaatctacaaatgtggactttgctgtcaatactgagggtacttattcagagcctcgccccattggcactcgttatctcacccgtaatctgtaattgcttgttaatcaataaaccggttaattcgtttcagttgaactttggtctctgcgaagggcgaattc

SEQ ID NO: 84 - protein, 738 aa, Artificial Sequence
  source: /note="Description of Artificial Sequence: Synthetic polypeptide"
MAADGYLPDWLEDNLSEGIREWWDLKPGAPKPKANQQKQDDGRGLVLPGYKYLGPFNGLDKGEPVNAADAAALEHDKAYDQQLKAGDNPYLRYNHADAEFQERLQEDTSFGGNLGRAVFQAKKRVLEPLGLVEEGAKTAPGKKRPVEPSPQRSPDSSTGIGKKGHQPARKRLNFGQTGDSESVPDPQPIGEPPAGPSGLGSGTMAAGGGAPMADNNEGADGVGSSSGNWHCDSTWLGDRVITTSTRTWALPTYNNHLYKQISNGTSGGSTNDNTYFGYSTPWGYFDFNRFHCHFSPRDWQRLINNNWGFRPKRLNFKLFNIQVKEVTQNEGTKTIANNLTSTIQVFTDSEYQLPYVLGSAHQGCLPPFPADVFMIPQYGYLTLNNGSQAVGRSSFYCLEYFPSQMLRTGNNFEFSYTFEDVPFHSSYAHSQSLDRLMNPLIDQYLYYLSRTQSTGGTQGTQQLLFSQAGPANMSAQAKNWLPGPCYRQQRVSTTLSQNNNSNFAWTGATKYHLNGRDSLVNPGVAMATHKDDEERFFPSSGVLMFGKQGAGKDNVDYSSVMLTSEEEIKTTNPVATEQYGVVADNLQQTNGAPIVGTVNSQGALPGMVWQNRDVYLQGPIWAKIPHTDGNFHPSPLMGGFGLKHPPPQILVKNTPVPADPPTTFSQAKLASFITQYSTGQVSVEIEWELQKENSKRWNPEIQYTSNYYKSTNVDFAVNTEGTYSEPRPIGTRYLTRNL

SEQ ID NO: 85 - DNA, 3122 bp, Artificial Sequence
  source: /note="Description of Artificial Sequence: Synthetic polynucleotide"
gaattcgccctttctacggctgcgtcaactggaccaatgagaactttcccttcaacgattgcgtcgacaagatggtgatctggtgggaggagggcaagatgacggccaaggtcgtggagtccgccaaggccattctcggcggcagcaaggtgcgtgtggaccaaaagtgcaagtcttccgcccagatcgatcccacccccgtgatcgtcacctccaacaccaacatgtgcgccgtgattgacgggaacagcgccaccttcgagcaccagcagccgttgcaggaccggatgttcaaatttgaactcacccgccgtctggagcatgactttggcaaggtgacgaagcaggaagtcaaagagttcttccgctgggcgcaggatcacgtgaccgaggtggcgcatgagttccacgtcagaaagggtggagccaacaagagacccgcccccgatgacgcggatataagcgagcccaagcgggcctgcccctcagtcgcggatccatcgacgtcagacgcggaaggagctccggtggactttgccgacaggtaccaaaacaaatgttctcgtcacgcgggcatgcttcagatgctgtttccctgcaagacatgcgagagaatgaatcagaatttcaacatttgcttcacgcacgggaccagagactgttcagaatgtttccccggcgtgtcagaatctcaaccggtcgtcagaaagaggacgtatcggaaactctgtgcgattcatcatctgctggggcgggctcccgagattgcttgctcggcctgcgatctggtcaacgtggacctggatgactgtgtttctgagcaataaatgacttaaaccaggtatggctgccgatggttatcttccagattggctcgaggacaacctctctgagggcattcgcgagtggtgggacttgaaacctggagccccgaaacccaaagccaaccagcaaaagcaggacgacggccggggtctggtgcttcctggctacaagtacctcggacccttcaacggactcgacaagggggagcccgtcaacgcggcggacgcagcggccctcgagcacgacaaagcctacgaccagcagctcaaagcgggtgacaatccgtacctgcggtataatcacgccgacgccgagtttcaggagcgtctgcaagaagatacgtcttttgggggcaacctcgggcgagcagtcttccaggccaagaagcgggttctcgaacctctcggtctggttgaggaaggcgctaagacggctcctggaaagaagagactggtagagcagtcgccacaagagccagactcctcctcgggcatcggcaagacaggccagcagcccgctaaaaagagactcaattttggtcagactggcgactcagagtcagtccccgacccacaacctctcggagaacctccagcagccccctcaggtctgggacctaatacaatggcttcaggcggtggcgctccaatggcagacaataacgaaggcgccgacggagtgggtaattcctcgggaaattggcattgcgattccacatggctgggggacagagtcatcaccaccagcacccgaacctgggccctgcccacctacaacaaccacctctacaagcaaatctccaacggcacctcgggaggaagcaccaacgacaacacctattttggctacagcaccccctgggggtattttgacttcaacagattccactgtcacttttcaccacgtgactggcaacgactcatcaacaacaattggggattccggcccaaaagactcaacttcaagctgttcaacatccaggtcaaggaagtcacgacgaacgaaggcaccaagaccatcgccaataatctcaccagcaccgtgcaggtctttacggactcggagtaccagttaccgtacgtgctaggatccgctcaccagggatgtctgcctccgttcccggcggacgtcttcacggttcctcagtacggctatttaactttaaacaatggaagccaagccctgggacgttcctccttctactgtctggagtatttcccatcgcagatgctgagaaccggcaacaactttcagttcagctacaccttcgaggacgtgcctttccacagcagctacgcgcacagccagagcctggacaggctgatgaatcccctcatcgaccagtacctgtactacctggtcagaacgcaaacgactggaactggagggacgcagactctggcattcagccaagcgggtcctagctcaatggccaaccaggctagaaattgggtgcccggaccttgctaccggcagcagcgcgtctccacgacaaccaaccagaacaacaacagcaactttgcctggacgggagctgccaagtttaagctgaacggccgagactctctaatgaatccgggcgtggcaatggcttcccacaaggatgacgacgaccgcttcttcccttcgagcggggtcctgatttttggcaagcaaggagccgggaacgatggagtggattacagccaagtgctgattacagatgaggaagaaatcaaggctaccaaccccgtggccacagaagaatatggagcagtggccatcaacaaccaggccgccaatacgcaggcgcagaccggactcgtgcacaaccagggggtgattcccggcatggtgtggcagaatagagacgtgtacctgcagggtcccatctgggccaaaattcctcacacggacggcaactttcacccgtctcccctgatgggcggctttggactgaagcacccgcctcctcaaattctcatcaagaacacaccggttccagcggacccgccgcttaccttcaaccaggccaagctgaactctttcatcacgcagtacagcaccggacaggtcagcgtggaaatcgagtgggagctgcagaaagaaaacagcaaacgctggaatccagagattcaatacacttccaactactacaaatctacaaatgtggactttgctgtcaacacggaaggagtttatagcgagcctcgccccattggcacccgttacctcacccgcaacctgtaattacatgttaatcaataaaccggttaattcgtttcagttgaactttggtctctgcgaagggcgaattc

SEQ ID NO: 86 - protein, 736 aa, Artificial Sequence
  source: /note="Description of Artificial Sequence: Synthetic polypeptide"
MAADGYLPDWLEDNLSEGIREWWDLKPGAPKPKANQQKQDDGRGLVLPGYKYLGPFNGLDKGEPVNAADAAALEHDKAYDQQLKAGDNPYLRYNHADAEFQERLQEDTSFGGNLGRAVFQAKKRVLEPLGLVEEGAKTAPGKKRLVEQSPQEPDSSSGIGKTGQQPAKKRLNFGQTGDSESVPDPQPLGEPPAAPSGLGPNTMASGGGAPMADNNEGADGVGNSSGNWHCDSTWLGDRVITTSTRTWALPTYNNHLYKQISNGTSGGSTNDNTYFGYSTPWGYFDFNRFHCHFSPRDWQRLINNNWGFRPKRLNFKLFNIQVKEVTTNEGTKTIANNLTSTVQVFTDSEYQLPYVLGSAHQGCLPPFPADVFTVPQYGYLTLNNGSQALGRSSFYCLEYFPSQMLRTGNNFQFSYTFEDVPFHSSYAHSQSLDRLMNPLIDQYLYYLVRTQTTGTGGTQTLAFSQAGPSSMANQARNWVPGPCYRQQRVSTTTNQNNNSNFAWTGAAKFKLNGRDSLMNPGVAMASHKDDDDRFFPSSGVLIFGKQGAGNDGVDYSQVLITDEEEIKATNPVATEEYGAVAINNQAANTQAQTGLVHNQGVIPGMVWQNRDVYLQGPIWAKIPHTDGNFHPSPLMGGFGLKHPPPQILIKNTPVPADPPLTFNQAKLNSFITQYSTGQVSVEIEWELQKENSKRWNPEIQYTSNYYKSTNVDFAVNTEGVYSEPRPIGTRYLTRNL

SEQ ID NO: 87 - DNA, 3117 bp, Artificial Sequence
  source: /note="Description of Artificial Sequence: Synthetic polynucleotide"
gaattcgcccttggctgcgtcaactggaccaatgagaactttcccttcaacgattgcgtcgacaagatggtgatctggtgggaggagggcaagatgacggccaaggtcgtggagtccgccaaggccattctcggcggcagcaaggtgcgtgtggaccaaaagtgcaagtcttccgcccagatcgatcccacccccgtgatcgtcacctccaacaccaacatgtgcgccgtgattgacgggaacagcaccaccttcgagcaccagcagccgttgcaggaccggatgttcaaatttgaactcacccgccgtctggagcatgactttggcaaggtgacgaagcaggaagtcaaagagttcttccgctgggcgcaggatcacgtgaccgaggtggcgcatgagttccacgtcagaaagggtggagccaacaagagacccgcccccgatgacgcggatataagcgagcccaagcgggcctgcccctcagtcgcggatccatcgacgtcagacgcggaaggagctccggtggactttgccgacaggtaccaaaacaaatgttctcgtcacgcgggcatgcttcagatgctgtttccctgcaagacatgcgagagaatgaatcagaatttcaacatttgcttcacgcacgggaccagagactgttcagaatgtttccccggcgtgtcagaatctcaaccggtcgtcagaaagaggacgtatcggaaactctgtgcgattcatcatctgctggggcgggctcccgagattgcttgctcggcctgcgatctggtcaacgtggacctggatgactgtgtttctgagcaataaatgacttaaaccaggtatggctgccgatggttatcttccagattggctcgaggacaacctctctgagggcattcgcgagtggtgggacttgaaacctggagccccgaaacccaaagccaaccagcaaaagcaggacgacggccggggtctggtgcttcctggctacaagtacctcggacccttcaacggactcgacaagggggagcccgtcaacgcggcggacgcagcggccctcgagcacgacaaagcctacgaccagcagctcaaagcgggtgacaatccgtacctgcggtataatcacgccgacgccgagtttcaggagcgtctgcaagaagatacgtcttttgggggcaacctcgggcgagcagtcttccaggccaagaagcgggttctcgaacctctcggtctggttgaggaaggcgctaagacggctcctggaaagaagagaccggtagagcagtcgccacaagagccagactcctcctcgggcatcggcaagacaggccagcagcccgctaaaaagagactcaattttggtcagactggcgactcagagtcagtccccgacccacaacctctcggagaacctccagcagccccctcaggtctgggacctaatacaatggcttcaggcggtggcgctccaatggcagacaataacgaaggcgccgacggagtgggtaattcctcgggaaattggcattgcgattccacatggctgggggacagagtcatcaccaccagcacccgaacctgggccctgcccacctacaacaaccacctctacaagcaaatctccaacggcacctcgggaggaagcaccaacgacaacacctattttggctacagcaccccctgggggtattttgacttcaacagattccactgtcacttttcaccacgtgactggcaacgactcatcaacaacaattggggattccggcccaaaagactcaacttcaagctgttcaacatccaggtcaaggaagtcacgacgaacgaaggcaccaagaccatcgccaataatctcaccagcaccgtgcgggtctttacggactcggagtaccagttaccgtacgtgctaggatccgctcaccagggatgtctgcctccgttcccggcggacgtcttcatggttcctcagtacggctatttaactttaaacaatggaagccaagccctgggacgttcctccttctactgtctggagtatttcccatcgcagatgctgagaaccggcaacaactttcagttcagctacaccttcgaggacgtgcctttccacagcagctacgcgcacagccagagcctggacaggctgatgaatcccctcatcgaccagtacctgtactacctggtcagaacgcaaacgactggaactggagggacgcagactctggcattcagccaagcgggtcctagctcaatggccaaccaggctagaaattgggtgcccggaccttgctaccggcagcagcgcgtctccacgacaaccaaccagagcaacaacagcaactttgcctggacgggagctgccaagtttaagctgaacggccgagactctctaatgaatccgggcgtggcaatggcttcccacaaggatgacgacgaccgcttcttcccttcgagcggggtcctgatttttggcaagcaaggagccgggaacgatggagtggattacagccaagtgctgattacagatgaggaagaaatcaaggctaccaaccccgtggccacagaagaatatggagcagtggccatcaacaaccaggccgccaatacgcaggcgcagaccggactcgtgcacaaccagggggtgattcccggcatggtgtggcagaatagagacgtgtacctgcagggtcccatctgggccaaaattcctcacacggacggcaactttcacccgtctcccctgatgggcggctttggactgaagcacccgcctcctcaaattctcatcaagaacacaccggttccagcggacccgccgcttaccttcaaccaggccaagctgaactctttcatcacgcagtacagcaccggacaggtcagcgtggaaatcgagtgggagctgcagaaagaaaacagcaaacgctggaatccagagattcaatacacttccaactactacaaatctacaaatgtggactttgctgtcaacacggaaggagtttatagcgagcctcgccccattggcacccgttacctcacccgcaacctgtaattacatgttaatcaataaaccggttaattcgtttcagttgaactttggtctctgcgaagggcgaattc

SEQ ID NO: 88 - protein, 736 aa, Artificial Sequence
  source: /note="Description of Artificial Sequence: Synthetic polypeptide"
MAADGYLPDWLEDNLSEGIREWWDLKPGAPKPKANQQKQDDGRGLVLPGYKYLGPFNGLDKGEPVNAADAAALEHDKAYDQQLKAGDNPYLRYNHADAEFQERLQEDTSFGGNLGRAVFQAKKRVLEPLGLVEEGAKTAPGKKRPVEQSPQEPDSSSGIGKTGQQPAKKRLNFGQTGDSESVPDPQPLGEPPAAPSGLGPNTMASGGGAPMADNNEGADGVGNSSGNWHCDSTWLGDRVITTSTRTWALPTYNNHLYKQISNGTSGGSTNDNTYFGYSTPWGYFDFNRFHCHFSPRDWQRLINNNWGFRPKRLNFKLFNIQVKEVTTNEGTKTIANNLTSTVRVFTDSEYQLPYVLGSAHQGCLPPFPADVFMVPQYGYLTLNNGSQALGRSSFYCLEYFPSQMLRTGNNFQFSYTFEDVPFHSSYAHSQSLDRLMNPLIDQYLYYLVRTQTTGTGGTQTLAFSQAGPSSMANQARNWVPGPCYRQQRVSTTTNQSNNSNFAWTGAAKFKLNGRDSLMNPGVAMASHKDDDDRFFPSSGVLIFGKQGAGNDGVDYSQVLITDEEEIKATNPVATEEYGAVAINNQAANTQAQTGLVHNQGVIPGMVWQNRDVYLQGPIWAKIPHTDGNFHPSPLMGGFGLKHPPPQILIKNTPVPADPPLTFNQAKLNSFITQYSTGQVSVEIEWELQKENSKRWNPEIQYTSNYYKSTNVDFAVNTEGVYSEPRPIGTRYLTRNL

SEQ ID NO: 89 - DNA, 3121 bp, Artificial Sequence
  source: /note="Description of Artificial Sequence: Synthetic polynucleotide"
gaattcgcccttctacggctgcgtcaactggaccaatgagaactttcccttcaacgattgcgtcgacaagatggtgatctggtgggaggagggcaagatgacggccaaggtcgtggagtccgccaaggccattctcggcggcagcaaggtgcgtgtggaccaaaagtgcaagtcttccgcccagatcgatcccacccccgtgatcgtcacctccaacaccaacatgtgcgccgtgattgacgggaacagcaccaccttcgagcaccagcagccgttgcaggaccggatgttcaaatttgaactcacccgccgtctggagcatgactttggcaaggtgacgaagcaggaagtcaaagagttcttccgctgggcgcaggatcacgtgaccgaggtggcgcatgagttccacgtcagaaagggtggcgccaacaagagacccgcccccgatgacgcggatataagcgagcccaagcgggcctgcccctcagtcgcggatccatcgacgtcagacgcggaaggagctccggtggactttgccgacaggtaccaaaacaaatgttctcgtcacgcgggcatgcttcagatgctgtttccctgcaagacatgcgagagaatgaatcagaatttcaacatttgcttcacgcacgggaccagagactgttcagaatgtttccccggcgtgtcagaatctcaaccggtcgtcagaaagaggacgtatcggaaactctgtgcgattcatcatctgctggggcgggctcccgagattgcttgctcggcctgcgatctggtcaacgtggacctggatgactgtgtttctgagcaataaatgacttaaaccaggtatggctgccgatggttatcttccagattggctcgaggacaacctctctgagggcattcgcgagtggtgggacttgaaacctggagccccgaaacccaaagccaaccagcaaaagcaggacgacggccggggtctggtgcttcctggctacaagtacctcggacccttcaacggactcgacaagggggagcccgtcaacgcggcggacgcagcggccctcgagcacgacaaagcctacgaccagcagctcaaagcgggtgacaatccgtacctgcggtataatcacgccgacgccgagtttcaggagcgtctgcaagaagatacgtcctttgggggcaacctcgggcgagcagtcttccaggccaagaagcgggttctcgaacctctcggtctggttgaggaaggcgctaagacggctcctggaaagaagagaccggtagagcagtcgccacaagagccagactcctcctcgggcatcggcaagacaggccagcagcccgctaaaaagagactcaattttggtcagactggcgactcagagtcagtccccgacccacaacctctcggagaacctccagcagccccctcaggtctgggacctaatacaatggcttcaggcggtggcgctccaatggcagacaataacgaaggcgccgacggagtgggtaattcctcgggaaattggcattgcgattccacatggctgggggacagagtcatcaccaccagcacccgaacctgggccctgcccacctacaacaaccacctctacaagcaaatctccaacggcacctcgggaggaagcaccaacgacaacacctattttggctacagcaccccctgggggtattttgacttcaacagattccactgtcacttttcaccacgtgactggcaacgactcatcaacaacaattggggattccggcccaaaagactcaacttcaagctgttcaacatccaggtcaaggaagtcacgacgaacgaaggcaccaagaccatcgccaataatctcaccagcaccgtgcaggtctttacggacttggagtaccagttaccgtacgtgctaggatccgctcaccagggatgtctgcctccgttcccggcggacgtcttcatggttcctcagtacggctatttaactttaaacaatggaagccaagccctgggacgttcctccttctactgtctggagtatttcccatcgcagatgccgagaaccggcaacaactttcagttcagctacaccttcgaggacgtgcctttccacagcagctacgcgcacagccagagcctggacaggctgatgaatcccctcatcgaccagtacctgtactacctggtcagaacgcaaacgactggaactggagggacgcagactctggcattcagccaagcgggtcctagctcaatggccaaccaggctagaaattgggtgcccggaccttgctaccggcagcagcgcgtctccacgacaaccaaccagaacaacaacagcaactttgcctggacgggagctgccaagtttaagctgaacggccgagactctctaatgaatccgggcgtggcaatggcttcccacaaggatgacgacgaccgcttcttcccttcgagcggggtcctgatttttggcaagcaaggagccgggaacgatggagtggattacagccaagtgctgattacagatgaggaagaaatcaaggctaccaaccccgtggccacagaagaatatggagcagtggccatcaacaaccaggccgccaatacgcaggcgcagaccggactcgtgcacaaccagggggtgattcccggcatggtgtggcagaatagagacgtgtacctgcagggtcccatctgggccaaaattcctcacacggacggcaactttcacccgtctcccctgatgggcggctttggactgaagcacccgcctcctcaaattctcatcaagaacacaccggttccagcggacccgccgcttaccttcaaccaggccaagctgaactctttcatcacgcagtacagcaccggacaggtcagcgtggaaatcgagtgggagctgcagaaagaaaacagcaaacgctggaatccagagattcaatacacttccaactactacaaatctacaaatgtggactttgctgtcaacacggaaggagtttatagcgagcctcgccccattggcacccgttacctcacccgcaacctgtaattacatgttaatcaataaaccggttaattcgtttcagttgaactttggtctctgcgaagggcgaattc

SEQ ID NO: 90 - protein, 736 aa, Artificial Sequence
  source: /note="Description of Artificial Sequence: Synthetic polypeptide"
MAADGYLPDWLEDNLSEGIREWWDLKPGAPKPKANQQKQDDGRGLVLPGYKYLGPFNGLDKGEPVNAADAAALEHDKAYDQQLKAGDNPYLRYNHADAEFQERLQEDTSFGGNLGRAVFQAKKRVLEPLGLVEEGAKTAPGKKRPVEQSPQEPDSSSGIGKTGQQPAKKRLNFGQTGDSESVPDPQPLGEPPAAPSGLGPNTMASGGGAPMADNNEGADGVGNSSGNWHCDSTWLGDRVITTSTRTWALPTYNNHLYKQISNGTSGGSTNDNTYFGYSTPWGYFDFNRFHCHFSPRDWQRLINNNWGFRPKRLNFKLFNIQVKEVTTNEGTKTIANNLTSTVQVFTDLEYQLPYVLGSAHQGCLPPFPADVFMVPQYGYLTLNNGSQALGRSSFYCLEYFPSQMPRTGNNFQFSYTFEDVPFHSSYAHSQSLDRLMNPLIDQYLYYLVRTQTTGTGGTQTLAFSQAGPSSMANQARNWVPGPCYRQQRVSTTTNQNNNSNFAWTGAAKFKLNGRDSLMNPGVAMASHKDDDDRFFPSSGVLIFGKQGAGNDGVDYSQVLITDEEEIKATNPVATEEYGAVAINNQAANTQAQTGLVHNQGVIPGMVWQNRDVYLQGPIWAKIPHTDGNFHPSPLMGGFGLKHPPPQILIKNTPVPADPPLTFNQAKLNSFITQYSTGQVSVEIEWELQKENSKRWNPEIQYTSNYYKSTNVDFAVNTEGVYSEPRPIGTRYLTRNL

SEQ ID NO: 91 - DNA, 3122 bp, Artificial Sequence
  source: /note="Description of Artificial Sequence: Synthetic polynucleotide"
gaattcgccctttctacggctgcgtcaactggaccaatgagaactttcccttcaacgattgcgtcgacaagatggtgatctggtgggaggagggcaagatgacggccaaggtcgtggagtccgccaaggccattctcggcggcagcaaggtgcgtgtggaccaaaagtgcaagtcttccgcccagatcgatcccacccccgtgatcgtcacctccaacaccaacatgtgcgccgtgattgacgggaacagcaccaccttcgagcaccagcagccgttgcaggaccggatgttcaaatttgaactcacccgccgtctggagcatgactttggcaaggtgacgaagcaggaagtcaaagggttcttccgctgggcgcaggatcacgtgaccgaggtggcgcatgagttccacgtgcgagcccaagcgggcctgcccctcagtcgcggatccatcgacgtcagaccagaaagggtggagccaacaagagacccgcccccgatgacgcggatataagcggaaggagctccggtggactttgccgacaggtaccaaaacaaatgttctcgtcacgcgggcatgcttcagatgctgtttccctgcaagacatgcgagagaatgaatcagaatttcaacatttgcttcacgcacgggaccagagactgttcagaatgtttccccggcgtgtcagaatctcaaccggtcgtcagaaagaggacgtatcggaaactctgtgcgattcatcatctgctggggcgggctcccgagattgcttgctcggcctgcgatctggtcaacgtggacctggatgactgtgtttctgagcaataaatgacttaaaccaggtatggctgccgatggttatcttccagattggctcgaggacaacctctctgagggcattcgcgagtggtgggacttgaaacctggagccccgaaacccaaagccaaccagcaaaagcaggacgacggccggggtctggtgcttcctggctacaagtacctcggacccttcaacggactcgacaagggggagcccgtcaacgcggcggacgcagcggccctcgagcacgacaaagcctacgaccagcagctcaaagcgggtgacaatccgtacctgcggtataatcacgccgacgccgagtttcaggagcgtctgcaagaagatacgtcttttgggggcaacctcgggcgagcagtcttccaggccaagaagcgggttctcgaacctctcggtctggttgaggaaggcgctaagacggctcctggaaagaagagaccggtagagcagtcgccacaagagccagactcctcctcgggcatcggcaagacaggccagcagcccgctaaaaagagactcaattttggtcagactggcgactcagagtcagtccccgacccacaacctctcggagaacctccagcagccccctcaggtctgggacctaatacaatggcttcaggcggtggcgctccaatggcagacaataacgaaggcgccgacggagtgggtaattcctcgggaaattggcattgcgattccacatggctgggggacagagtcatcaccaccagcacccgaacctgggccctgcccacctacaacaaccacctctacaagcaaatctccaacggcacctcgggaggaagcaccaacgacaacacctattttggctacagcaccccctgggggtattttgacttcaacagattccactgtcacttttcaccacgtgactggcaacgactcatcaacaacaattggggattccggcccaaaagactcaacttcaagctgttcaacatccaggtcaaggaagtcacgacgaacgaaggcaccaagaccatcgccaataatctcaccagcaccgtgcaggtctttacggactcggagtaccagttaccgtacgtgctaggatccgctcaccagggatgtctgcctccgttcccggcggacgtcttcatggttcctcagtacggctatttaactttaaacaatggaagccaagccctgggacgttcctccttctactgtctggagtatttcccatcgcagatgctgagaaccggcaacaactttcagttcagctacaccttcgaggacgtgcctttccacagcagctacgcgcacagccagagcctggacaggctgatgaatcccctcatcgaccagtacctgtactacctggtcagaacgcaaacgactggaactggagggacgcagactctggcattcagccaagcgggtcctagctcaatggccaaccaggctagaaattgggtgcccggaccttgctaccggcagcagcgcgtctccacgacaaccaaccagaacaacaacagcaactttgcctggacgggagctgccaagtttaagctgaacggccgagactctctaatgaatccgggcgtggcaatggcttcccacaaggatgacgacgaccgcttcttcccttcgagcggggtcctgatttttggcaagcaaggagccgggaacgatggagtggattacagccaagtgctgattacagatgaggaagaaatcaaggctaccaaccccgtggccacagaagaatatggagcagtggccatcaacaaccaggccgccaatacgcaggcgcagaccggactcgtgcacaaccagggggtgattcccggcatggtgtggcagaatagagacgtgtacctgcagggtcccatctgggccaaaattcctcacacggacggcaactttcacccgtctcccctgatgggcggctttggactgaagcacccgcctcctcaaattctcatcaagaacacaccggttccagcggacccgccgcttaccttcaaccaggccaagctgaactctttcatcacgcagtacagcaccggacaggtcagcgtggaaatcgagtgggagctgcagaaagaaaacagcaaacgctggaatccagagattcaatacacttccaactactacaaatctacaaatgtggactttgctgtcaacacggagggggtttatagcgagcctcgccccattggcacccgttacctcacccgcaacctgtaattacatgttaatcaataaaccggttaattcgtttcagttgaactttggtctctgcgaagggcgaattc

SEQ ID NO: 92 - protein, 736 aa, Artificial Sequence
  source: /note="Description of Artificial Sequence: Synthetic polypeptide"
MAADGYLPDWLEDNLSEGIREWWDLKPGAPKPKANQQKQDDGRGLVLPGYKYLGPFNGLDKGEPVNAADAAALEHDKAYDQQLKAGDNPYLRYNHADAEFQERLQEDTSFGGNLGRAVFQAKKRVLEPLGLVEEGAKTAPGKKRPVEQSPQEPDSSSGIGKTGQQPAKKRLNFGQTGDSESVPDPQPLGEPPAAPSGLGPNTMASGGGAPMADNNEGADGVGNSSGNWHCDSTWLGDRVITTSTRTWALPTYNNHLYKQISNGTSGGSTNDNTYFGYSTPWGYFDFNRFHCHFSPRDWQRLINNNWGFRPKRLNFKLFNIQVKEVTTNEGTKTIANNLTSTVQVFTDSEYQLPYVLGSAHQGCLPPFPADVFMVPQYGYLTLNNGSQALGRSSFYCLEYFPSQMLRTGNNFQFSYTFEDVPFHSSYAHSQSLDRLMNPLIDQYLYYLVRTQTTGTGGTQTLAFSQAGPSSMANQARNWVPGPCYRQQRVSTTTNQNNNSNFAWTGAAKFKLNGRDSLMNPGVAMASHKDDDDRFFPSSGVLIFGKQGAGNDGVDYSQVLITDEEEIKATNPVATEEYGAVAINNQAANTQAQTGLVHNQGVIPGMVWQNRDVYLQGPIWAKIPHTDGNFHPSPLMGGFGLKHPPPQILIKNTPVPADPPLTFNQAKLNSFITQYSTGQVSVEIEWELQKENSKRWNPEIQYTSNYYKSTNVDFAVNTEGVYSEPRPIGTRYLTRNL

SEQ ID NO: 93 - DNA, 2370 bp, Artificial Sequence
  source: /note="Description of Artificial Sequence: Synthetic polynucleotide"
gaattcgccctttctacggctgcgtcaactggaccaatgagaactttcccttcaacgattgcgtcgacaagatggtgatctggtgggaggagggcaagatgacggccaaggtcgtggagtccgccaaggccattctcggcggcagcaaggtgcgcgtggaccaaaagtgcaagtcgtccgcccagatcgaccccacccccgtgatcgtcacctccaacaccaacatgtgcgccgtgattgacgggaacagcaccaccttcgagcaccagcagccgttgcaggaccggatgttcaagttcgaactcacccgccgtctggagcacgactttggcaaggtgaccaagcaggaagtcaaagagttcttccgctgggcgcaggatcacgtgaccgaggtggcgcatgagttctacgtcagaaagggcggagccagcaaaagacccgcccccgatgacgcggatataagcgagcccaagcgggcctgcccctcagtcgcggatccatcgacgtcagacgcggaaggagctccggtggactttgccgacaggtaccaaaacaaatgttctcgtcacgcgggcatgcttcagacgctgtttccctgcaaaacgtgcgagagaatgaatcagaatttcaacatttgcttcacgcacggggtcagagactgctcagaatgtttccccggtgcatcagaatctcaaccggtcgtcagaaaaaaaacgtatcagaaactgtgtgccattcatcatctgctggggcgggcacccgagattgcttgctcggcctgcgatctggtcaacgtggacctggacgactgtgtttctgagcaataaatgacttaaaccaggtatggctgccgatggttatcttccagattggcttgaggacaacctctctgagggcattcgcgagtggtgggacctgaaacctggagccccgaaacccaaagccaaccagcaaaagcaggacgacggccggggtctggtgcttcctggctacaagtacctcggacccttcaacggactcgacaagggggagcccgtcaacgcggcggacgcagcggccctcgagcacgacaaggcctacgaccagcagctcaaagcgggtgacaatccgtacctgcggtataaccacgccgacgccgagtttcaggagcgtctgcaagaagatacgtcttttgggggcaacctcgggcgagcagtcttccaggccaagaagcgggttctcgaacctctcggtctggttgaggaaggcgctaagacggctcctggaaagaagagaccggtagagccatcacctcagcgttcccccgactcctccacgggcatcggcaagaaaggccaccagcccgcgagaaagagactgaactttgggcagactggcgactcggagtcagtccccgaccctcaaccaatcggagaaccaccagcaggcccctctggtctgggatctggtacaatggctgcaggcggtggcgctccaatggcagacaataacgaaggcgccgacggagtgggtagttcctcaggaaattggcattgcgattccacatggctgggcgacagagtcatcaccaccagcacccgaacctgggccctgcccacctacaacaaccatctctacaagcaaatctccaacgggacatcgggaggaagcactaacgacaacacctactttggctacagcaccccctgggggtattttgacttcaacagattccactgccacttctcaccacgtgactggcagcgactcatcaacaataactggggattccggcccaagagactcaacttcaagctcttcaacatccaggtcaaggaggtcacgcagaatgaaggcaccaagaccatcgccaataaccttaccagcacgattcaggtgtttacggactcggaataccagctcccgtacgtcctcggctctgcgcaccagggctgcctccctccgttcccggcggacgtcttcatgattcctcagtacgggtatctgaccctaaacaatggcagtcaggctgtgggccgttcctccttctactgcctggaatacttcccttctcaaatgctgaggacgggcaacaactttgaattcagctacaccttcgaggacgtgcctttccacagcagctacgcgcacagccagagcctggaccggctgatgaaccctctcatcgaccagtacctgtattacttatccagaactcagtccacaggaggaactcaaggtactcagcaattgttattttctcaagccgggcccgcaaacatgtyggctcaggccaagaactggctacctggaccgtgttaccgtcagcaacgagtttccacgacactgtcgcaaaacaacaacagcaattttgctggaccggtgccacca

SEQ ID NO: 94 - protein, 738 aa, Artificial Sequence; identical to SEQ ID NO: 84
  source: /note="Description of Artificial Sequence: Synthetic polypeptide"

SEQ ID NO: 95 - DNA, 2205 bp, Artificial Sequence
  source: /note="Description of Artificial Sequence: Synthetic polynucleotide"
atgactgacggttaccttccagattggctagaggacaacctctctgaaggcgttcgagagtggtgggcgctgcaacctggagcccctaaacccaaggcaaatcaacaacatcaggacaacgctcggggtcttgtgcttccgggttacaaatacctcggacccggcaacggactcgacaagggggaacccgtcaacgcagcggacgcggcagccctcgagcacgacaaggcctacgaccagcagctcaaggccggtgacaacccctacctcaagtacaaccacgccgacgcggagttccagcagcggcttcagggcgacacatcgtttgggggcaacctcggcagagcagtcttccaggccaaaaagagggttcttgaacctcttggtctggttgagcaagcgggtgagacggctcctggaaagaagagaccgttgattgaatccccccagcagcccgactcctccacgggtatcggcaaaaaaggcaagcagccggctaaaaagaagctcgttttcgaagacgaaactggagcaggcgacggaccccctgagggatcaacttccggagccatgtctgatgacagtgagatgcgtgcagcagctggcggagctgcagtcgagggcggacaaggtgccgatggagtgggtaatgcctcgggtgattggcattgcgattccacctggtctgagggccacgtcacgaccaccagcaccagaacctgggtcttgcccacctacaacaaccacctctacaagcgactcggagagagcctgcagtccaacacctacaacggattctccaccccctggggatactttgacttcaaccgcttccactgccacttctcaccacgtgactggcagcgactcatcaacaacaactggggcatgcgacccaaagccatgcgggtcaaaatcttcaacatccaggtcaaggaggtcacgacgtcgaacggcgagacaacggtggctaataaccttaccagcacggttcagatctttgcggactcgtcgtacgaactgccgtacgtgatggatgcgggtcaagagggcagcctgcctccttttcccaacgacgtctttatggtgccccagtacggctactgtggactggtgaccggcaacacttcgcagcaacagactgacagaaatgccttctactgcctggagtactttccttcgcagatgctgcggactggcaacaactttgaaattacgtacagttttgagaaggtgcctttccactcgatgtacgcgcacagccagagcctggaccggctgatgaaccctctcatcgaccagtacctgtggggactgcaatcgaccaccaccggaaccaccctgaatgccgggactgccaccaccaactttaccaagctgcggcctaccaacttttccaactttaaaaagaactggctgcccgggccttcaatcaagcagcagggcttctcaaagactgccaatcaaaactacaagatccctgccaccgggtcagacagtctcatcaaatacgagacgcacagcactctggacggaagatggagtgccctgacccccggacctccaatggccacggctggacctgcggacagcaagttcagcaacagccagctcatctttgcggggcctaaacagaacggcaacacggccaccgtacccgggactctgatcttcacctctgaggaggagctggcagccaccaacgccaccgatacggacatgtggggcaacctacctggcggtgaccagagcaacagcaacctgccgaccgtggacagactgacagccttgggagccgtgcctggaatggtctggcaaaacagagacatttactaccagggtcccatttgggccaagattcctcataccgatggacactttcacccctcaccgctgattggtgggtttgggctgaaacacccgcctcctcaaatttttatcaagaacaccccggtacctgcgaatcctgcaacgaccttcagctctactccggtaaactccttcattactcagtacagcactggccaggtgtcggtgcagattgactgggagatccagaaggagcggtccaaacgctggaaccccgaggtccagtttacctccaactacggacagcaaaactctctgttgtgggctcccgatgcggctgggaaatacactgagcctagggctatcggtacccgctacctcacccaccacctgtaa

SEQ ID NO: 96 - protein, 734 aa, Artificial Sequence; identical to SEQ ID NO: 68
  source: /note="Description of Artificial Sequence: Synthetic polypeptide"

SEQ ID NO: 97 - DNA, 3128 bp, Artificial Sequence
  source: /note="Description of Artificial Sequence: Synthetic polynucleotide"
gaattcgccctttctacggctgcgtcaactggaccaatgagaactttcccttcaacgattgcgtcgacaagatgttgatctggtgggaggagggcaagatgacggccaaggtcgtggagtccgccaaggccattctcggcggcagcaaagtgcgcgtggaccaaaagtgcaagccgtccgcccagatcgaccccacccccgtgatcgtcacctccaacaccaacatgtgcgccgtgattgacgggaacagcaccaccttcgagcaccagcagccgttgcgggaccggatgttcaagtttgaactcacccgccgtctggagcacgactttggcaaggtgacaaagcaggaagtcagagagttcttccgctgggcgcaggatcacgtgaccgaggtggcgcacgagttctacgtcagaaagggtggagccaacaagagacccgcccccgatgacgcggataaaagcgagcccaagcgggcctgcccctcagtcgcggatccatcgacgtcagacgcggaaggagctccggtggactttgccgacaggtaccaaaacaaatgttctcgtcacgcgggcatgcttcagatgctgtttccctgcaaaacatgcgagagaatgaatcagaatttcaacatttgcttcacgcacgggaccagagactgttcagaatgtttccccggcgtgtcagaatctcaaccggtcgtcagaaaaaagacgtatcggaaactctgtgcgattcatcatctgctggggcgggcacccgagattgcttgctcggcctgcgatctggtcaacgtggacctagatgactgtgtttctgagcaataaatgacttaaaccaggtatggctgccgatggttatcttccagattggctcgaggacaacctctctgagggcattcgcgagtggtgggacttgaaacctggagccccgaaacccaaagccaaccagcaaaagcaggacgacggccggggtctggtgcttcctggctacaagtacctcggacccttcaacggactcgacaagggggagcccgtcaacgcggcggacgcagcggccctcgagcacgacaaggcctacgaccagcagctcaaagcgggtgacaatccgtacctgcggtataaccacgccgacgccgagtttcaggagcgtctgcaagaagatacgtcttttgggggcaacctcgggcgagcagtcttccaggccaagaagcgggttctcgaacctctcggtctggttgaggaaggcgctaagacggctcctggaaagaagagaccggtagagccatcaccccagcgttctccagactcctctacgggcatcggcaagaaaggccagcagcccgcgaaaaagagactcaactttgggcagactggcgactcagagtcagtgcccgaccctcaaccaatcggagaaccccccgcaggcccctctggtctgggatctggtacaatggctgcaggcggtggcgctccaatggcagacaataacgaaggcgccgacggagtgggtagttcctcaggaaattggcattgcgattccacatggctgggcgacagagtcatcaccaccagcacccgaacctgggccctccccacctacaacaaccacctctacaagcaaatctccaacgggacttcgggaggaagcaccaacgacaacacctacttcggctacagcaccccctgggggtattttgactttaacagattccactgccacttctcaccacgtgactggcagcgactcatcaacaacaactggggattccggcccaagagactcaacttcaagctcttcaacatccaggtcaaggaggtcacgcagaatgaaggcaccaagaccatcgccaataaccttaccagcacgattcaggtctttacggactcggaataccagctcccgtacgtcctcggctctgcgcaccagggctgcctgcctccgttcccggcggacgtcttcatgattcctcagtacgggtacctgactctgaacaatggcagtcaggccgtgggccgttcctccttctactgcctggagtactttccttctcaaatgctgagaacgggcaacaactttgagttcagctaccagtttgaggacgtgccttttcacagcagctacgcgcacagccaaagcctggaccggctgatgaaccccctcatcgaccagtacctgtactacctgtctcggactcagtccacgggaggtaccgcaggaactcagcagttgctattttctcaggccgggcctaataacatgtcggctcaggccaaaaactggctacccgggccctgctaccggcagcaacgcgtctccacgacactgtcgcaaaataacaacagcaactgtaaatcccggtgtcgctatggcaacccacaaggacgacgaagagcgattttgcctggaccggtgccaccaagtatcatctgaatggcagagactctctgttttccgtccagcggagtcttaatgtttgggaaacagggagctggaaaagacaacgtggactatagcagcgttatgctaaccagtgaggaagaaattaaaaccaccaacccagtggccacggaacagtacggcgtggtggccgataacctgcaacagcaaaacgccgctcctattgtaggggccgtcaacagtcaaggagccttacctggcatggtctggcagaaccgggacgtgtacctgcagggtcctatctgggccaagattcctcacacggacggaaactttcatccctcgccgctgatgggaggctttggactgaaacacccgcctcctcagatcctgattaagaatacacctgttcccgcggatcctccaactaccttcagtcaagctaagctggcgtcgttcatcacgcagtacagcaccggacaggtcagcgtggaaattgaatgggagctgcagaaagaaaacagcaaacgctggaacccagagattcaatacacttccaactactacaaatctacaaatgtggacttcgctgttaacacagatggcacttattctgagcctcgccccattggcacccgttacctcacccgtaatctgtaattgctcgttaatcaataaaccggttgattcgtttcagttgaactttggtctctgcgaagggcgaattc

SEQ ID NO: 98 - protein, 738 aa, Artificial Sequence; identical to SEQ ID NO: 18
  source: /note="Description of Artificial Sequence: Synthetic polypeptide"

SEQ ID NO: 99 - DNA, 3128 bp, Artificial Sequence
  source: /note="Description of Artificial Sequence: Synthetic polynucleotide"
gaattcgccctttctacggctgcgtcaactggaccaatgagaactttcccttcaacgattgcgtcgacaagatggtgatctggtgggaggagggcaagatgacggccaaggtcgtggagtccgccaaggccattctcggcggcagcaaagtgcgcgtggaccaaaagtgcaagtcgtccgcccagatcgaccccacccccgtgatcgtcacctccaacaccaacatgtgcgccgtgattgacgggaacagcaccaccttcgagcaccagcagccgttgcaggaccggatgttcaagtttgaactcacccgccgtctggagcacgactttggcaaggtgacaaagcaggaagtcagagagttcttccgctgggcgcaggatcacgtgaccgaggtggcgcacgagttctacgtcagaaagggtggagccaacaagagacccgcccccgatgacgcggataaaagcgagcccaagcgggcctgcccctcagtcgcggatccatcgacgtcagacgcggaaggagctccggtggactttgccgacaggtaccaaaacaaatgttctcgtcacgcgggcatgcttcagatgctgtttccctgcaaaacatgcgagagaatgaatcagaatttcaacatttgcttcacgcacgggaccagagactgttcagaatgtttccccggcgtgtcagaatctcaaccggttgtcagaaaaaagacgtatcggaaactctgtgcgattcatcatctgctggggcgggcacccgagattgcttgctcggcctgcgatctggtcaacgtggacctagatgactgtgtttctgagcaataaatgacttaaaccaggtatggctgccgatggttatcttccagattggctcgaggacaacctctctgagggcattcgcgagtggtgggacttgaaacctggagccccgaaacccaaagccaaccagcaaaagcaggacgacggccggggtctggtgcttcctggctacaagtacctcggacccttcaacggactcgacaagggggagcccgtcaacgcggcggacgcagcggccctcgagcacgacaaggcctacgaccagcagctcaaagcgggtgacaatccgtacctgcggtataaccacgccgacgccgagtttcaggagcgtctgcaagaagatacgtcttttgggggcaacctcgggcgagcagtcttccaggccaagaagcgggttctcgaacctctcggtctggttgaggaaggcgctaagacggctcctggaaagaagagaccggtagagccatcaccccagcgttctccagactcctctacgggcatcggcaagaaaggccagcagcccgcgaaaaagagactcaactttgggcagactggcgactcagagtcagtgcccgaccctcaaccaatcggagaaccccccgcaggcccctctggtctgggatctggtacaatggctgcaggcggtggcgctccaatggcagacaataacgaaggcgccgacggagtgggtagttcctcaggaaattggcattgcgattccacatggctgggcgacagagtcatcaccaccagcacccgaacctgggccctccccacctacaacaaccacctctacaagcaaatctccaacgggacttcgggaggaagcaccaacgacaacacctacttcggctacagcaccccctgggggtattttgactttaacagattccactgccacttctcaccacgtgactggcagcgactcatcaacaacaactggggattccggcccaagagacccaacttcaagctcttcaacatccaggtcaaggaggtcacgcagaatgaaggcaccaagaccatcgccaataaccttaccagcacgattcaggtctttacggactcggaataccagctcccgtacgtcctcggctctgcgcaccagggctgcctgcctccgttcccggcggacgtcttcatgattcctcagtacgggtacctgactctgaacaatggcagtcaggccgtgggccgttcctccttctactgcctggagtactttccttctcaaatgctgagaacgggcaacaactttgagttcagctaccagtttgaggacgtgccttttcacagcagctacgcgcacagccaaagcctggaccggctgatgaaccccctcatcgaccagtacctgtactacctgtctcggactcagtccacgggaggtaccgcaggaactcagcagttgctattttctcaggccgggcctaataacatgtcggctcaggccaaaaactggctacccgggccctgctaccggcagcaacgcgtctccacgacactgtcgcaaaataacaacagcaactttgcctggaccggtgccaccaagtatcatctgaatggcagagactctctggtaaatcccggtgtcgctatggcaacccacaaggacgacgaagagcgattttttccgtccagcggagtcttaatgtttgggaaacagggagctggaaaagacaacgtggactatagcagcgttatgctaaccagtgaggaagaaattaaaaccaccaacccagtggccacagaacagtacggcgtggtggccgataacctgcaacagcaaaacgccgctcctattgtaggggccgtcaacagtcaaggagccttacctggcatggtctggcagaaccgggacgtgtacctgcagggtcctatctgggccaagattcctcacacggacggaaactttcatccctcgccgctgatgggaggctttggactgaaacacccgcctcctcagatcctgattaagaatacacctgttcccgcggatcctccaactaccttcagtcaagctaagctggcgtcgttcatcacgcagtacagcaccggacaggtcagcgtggaaattgaatgggagctgcagaaagaaaacagcaaacgctggaacccagagattcaatacacttccaactactacaaatctacaaatgtggactttgctgttaacacagatggcacttattctgagcctcgccccattggcacccgttacctcacccgtaatctgtaattgcttgttaatcaataaaccggttgattcgtttcagttgaactttggtctctgcgaagggcgaattc

SEQ ID NO: 100 - protein, 738 aa, Artificial Sequence
  source: /note="Description of Artificial Sequence: Synthetic polypeptide"
MAADGYLPDWLEDNLSEGIREWWDLKPGAPKPKANQQKQDDGRGLVLPGYKYLGPFNGLDKGEPVNAADAAALEHDKAYDQQLKAGDNPYLRYNHADAEFQERLQEDTSFGGNLGRAVFQAKKRVLEPLGLVEEGAKTAPGKKRPVEPSPQRSPDSSTGIGKKGQQPAKKRLNFGQTGDSESVPDPQPIGEPPAGPSGLGSGTMAAGGGAPMADNNEGADGVGSSSGNWHCDSTWLGDRVITTSTRTWALPTYNNHLYKQISNGTSGGSTNDNTYFGYSTPWGYFDFNRFHCHFSPRDWQRLINNNWGFRPKRPNFKLFNIQVKEVTQNEGTKTIANNLTSTIQVFTDSEYQLPYVLGSAHQGCLPPFPADVFMIPQYGYLTLNNGSQAVGRSSFYCLEYFPSQMLRTGNNFEFSYQFEDVPFHSSYAHSQSLDRLMNPLIDQYLYYLSRTQSTGGTAGTQQLLFSQAGPNNMSAQAKNWLPGPCYRQQRVSTTLSQNNNSNFAWTGATKYHLNGRDSLVNPGVAMATHKDDEERFFPSSGVLMFGKQGAGKDNVDYSSVMLTSEEEIKTTNPVATEQYGVVADNLQQQNAAPIVGAVNSQGALPGMVWQNRDVYLQGPIWAKIPHTDGNFHPSPLMGGFGLKHPPPQILIKNTPVPADPPTTFSQAKLASFITQYSTGQVSVEIEWELQKENSKRWNPEIQYTSNYYKSTNVDFAVNTDGTYSEPRPIGTRYLTRNL

SEQ ID NO: 101 - protein, 738 aa, Artificial Sequence
  source: /note="Description of Artificial Sequence: Synthetic polypeptide"
MAADGYLPDWLEDNLSEGIREWWDLKPGAPKPKANQQKQDDGRGLVLPGYKYLGPFNGLDKGEPVNAADAAALEHDKAYDQQLKAGDNPYLRYNHADAEFQERLQEDTSFGGNLGRAVFQAKKRVLEPLGLVEEAAKTAPGKKRPVEPSPQRSPDSSTGIGKKGQQPAKKRLNFGQTGDSESVPDPQPIGEPPAGPSGLGSGTMAAGGGAPMADNNEGADGVGSSSGNWHCDSTWLGDRVITTSTRTWALPTYNNHLYKQISNGTSGGSTNDNTYFGYSTPWGYFDFNRFHCHFSPRDWQRLINNNWGFRPKRLSFKLFNIQVKEVTQNEGTKTIANNLTSTIQVFTDSEYQLPYVLGSAHQGCLPPFPADVFMIPQYGYLTLNNGSQAVGRSSFYCLEYFPSQMLRTGNNFEFSYTFEDVPFHSSYAHSQSLDRLMNPLIDQYLYYLSRTQSTGGTQGTQQLLFSQAGPANMSAQAKNWLPGPCYRQQRVSTTLSQNNNSNFAWTGATKYHLNGRDSLVNPGVAMATHKDDEERFFPSSGVLMFGKQGAGRDNVDYSSVMLTSEEEIKTTNPVATEQYGVVADNLQQTNTGPIVGNVNSQGALPGMVWQNRDVYLQGPIWAKIPHTDGNFHPSPLMGGFGLKHPPPQILIKNTPVPADPPTTFSQAKLASFITQYSTGQVSVEIEWELQKENSKRWNPEIQYTSNYYKSTNVDFAVNTEGTYSEPRPIGTRYLTRNL

SEQ ID NO: 102 - DNA, 2172 bp, Artificial Sequence
  source: /note="Description of Artificial Sequence: Synthetic polynucleotide"
atgtcttttgttgatcaccctccagattggttggaagaagttggtgaaggtcttcgcgagtttttgggccttgaagcgggcccaccgaaaccaaaacccaatcagcagcatcaagatcaagcccgtggtcttgtgctgcctggttataactatctcggacccggaaacggtctcgatcgaggagagcctgtcaacagggcagacgaggtcgcgcgagagcacgacatctcgtacaacgagcagcttgaggcgggagacaacccctacctcaagtacaaccacgcggacgccgagtttcaggagaagctcgccgacgacacatccttcgggggaaacctcggaaaggcagtctttcaggccaagaaaagggttctcgaaccttttggcctggttgaagagggtgctaagacggcccctaccggaaagcggatagacgaccactttccaaaaagaaagaaggctcggaccgaagaggactccaagccttccacctcgtcagacgccgaagctggacccagcggatcccagcagctgcaaatcccagcccaaccagcctcaagtttgggagctgatacaatgtctgcgggaggtggcggcccattgggcgacaataaccaaggtgccgatggagtgggcaatgcctcgggagattggcattgcgattccacgtggatgggggacagagtcgtcaccaagtccacccgaacctgggtgctgcccagctacaacaaccaccagtaccgagagatcaaaagcggctccgtcgacggaagcaacgccaacgcctactttggatacagcaccccctgggggtactttgactttaaccgcttccacagccactggagcccccgagactggcaaagactcatcaacaactactggggcttcagaccccggtccctcagagtcaaaatcttcaacattcaagtcaaagaggtcacggtgcaggactccaccaccaccatcgccaacaacctcacctccaccgtccaagtgtttacggacgacgactaccagctgccctacgtcgtcggcaacgggaccgagggatgcctgccggccttccctccgcaggtctttacgctgccgcagtacggttacgcgacgctgaaccgcgacaacacagaaaatcccaccgagaggagcagcttcttctgcctagagtactttcccagcaagatgctgagaacgggcaacaactttgagtttacctacaactttgaggaggtgcccttccactccagcttcgctcccagtcagaacctgttcaagctggccaacccgctggtggaccagtacttgtaccgcttcgtgagcacaaataacactggcggagtccagttcaacaagaacctggccgggagatacgccaacacctacaaaaactggttcccggggcccatgggccgaacccagggctggaacctgggctccggggtcaaccgcgccagtgtcagcgccttcgccacgaccaataggatggagctcgagggcgcgagttaccaggtgcccccgcagccgaacggcatgaccaacaacctccagggcagcaacacctatgccctggagaacactatgatcttcaacagccagccggcgaacccgggcaccaccgccacgtacctcgagggcaacatgctcatcaccagcgagagcgagacgcagccggtgaaccgcgtggcgtacaacgtcggcgggcagatggccaccaacaaccagagctccaccactgcccccgcgaccggcacgtacaacctccaggaaatcgtgcccggcagcgtgtggatggagagggacgtgtacctccaaggacccatctgggccaagatcccagagacgggggcgcactttcacccctctccggccatgggcggattcggactcaaacacccaccgcccatgatgctcatcaagaacacgcctgtgcccggaaatatcaccagcttctcggacgtgcccgtcagcagcttcatcacccagtacagcaccgggcaggtcaccgtggagatggagtgggagctcaagaaggaaaactccaagaggtggaacccagagatccagtacacaaacaactacaacgacccccagtttgtggactttgccccggacagcaccggggaatacagaaccaccagacctatcggaacccgataccttacccgacccctt

SEQ ID NO: 103 - protein, 720 aa, Artificial Sequence
  source: /note="Description of Artificial Sequence: Synthetic polypeptide"
MSFVDHPPDWLEEVGEGLREFLGLEAGPPKPKPNQQHQDQARGLVLPGYNYLGPGNGLDRGEPVNRADEVAREHDISYNEQLEAGDNPYLKYNHADAEFQEKLADDTSFGGNLGKAVFQAKKRVLEPFGLVEEGAKTAPTGKRIDDHFPKRKKARTEEDSKPSTSSDAEAGPSGSQQLQIPAQPASSLGADTMSAGGGGPLGDNNQGADGVGNASGDWHCDSTWMGDRVVTKSTRTWVLPSYNNHQYREIKSGSVDGSNANAYFGYSTPWGYFDFNRFHSHWSPRDWQRLINNYWGFRPRSLRVKIFNIQVKEVTVQDSTTTIANNLTSTVQVFTDDDYQLPYVVGNGTEGCLPAFPPQVFTLPQYGYATLNRDNTENPTERSSFFCLEYFPSKMLRTGNNFEFTYNFEEVPFHSSFAPSQNLFKLANPLVDQYLYRFVSTNNTGGVQFNKNLAGRYANTYKNWFPGPMGRTQGWNLGSGVNRASVSAFATTNRMELEGASYQVPPQPNGMTNNLQGSNTYALENTMIFNSQPANPGTTATYLEGNMLITSESETQPVNRVAYNVGGQMATNNQSSTTAPATGTYNLQEIVPGSVWMERDVYLQGPIWAKIPETGAHFHPSPAMGGFGLKHPPPMMLIKNTPVPGNITSFSDVPVSSFITQYSTGQVTVEMEWELKKENSKRWNPEIQYTNNYNDPQFVDFAPDSTGEYRTTRPIGTRYL

SEQ ID NO: 104 - protein, 724 aa, Adeno-associated virus 5
MSFVDHPPDWLEEVGEGLREFLGLEAGPPKPKPNQQHQDQARGLVLPGYNYLGPGNGLDRGEPVNRADEVAREHDISYNEQLEAGDNPYLKYNHADAEFQEKLADDTSFGGNLGKAVFQAKKRVLEPFGLVEEGAKTAPTGKRIDDHFPKRKKARTEEDSKPSTSSDAEAGPSGSQQLQIPAQPASSLGADTMSAGGGGPLGDNNQGADGVGNASGDWHCDSTWMGDRVVTKSTRTWVLPSYNNHQYREIKSGSVDGSNANAYFGYSTPWGYFDFNRFHSHWSPRDWQRLINNYWGFRPRSLRVKIFNIQVKEVTVQDSTTTIANNLTSTVQVFTDDDYQLPYVVGNGTEGCLPAFPPQVFTLPQYGYATLNRDNTENPTERSSFFCLEYFPSKMLRTGNNFEFTYNFEEVPFHSSFAPSQNLFKLANPLVDQYLYRFVSTNNTGGVQFNKNLAGRYANTYKNWFPGPMGRTQGWNLGSGVNRASVSAFATTNRMELEGASYQVPPQPNGMTNNLQGSNTYALENTMIFNSQPANPGTTATYLEGNMLITSESETQPVNRVAYNVGGQMATNNQSSTTAPATGTYNLQEIVPGSVWMERDVYLQGPIWAKIPETGAHFHPSPAMGGFGLKHPPPMMLIKNTPVPGNITSFSDVPVSSFITQYSTGQVTVEMEWELKKENSKRWNPEIQYTNNYNDPQFVDFAPDSTGEYRTTRPIGTRYLTRPL

SEQ ID NO: 105 - DNA, 2175 bp, Artificial Sequence
  source: /note="Description of Artificial Sequence: Synthetic polynucleotide"
atgtcttttgttgatcaccctccagattggttggaagaagttggtgaaggtcttcgcgagtttttgggccttgaagcgggcccaccgaaaccaaaacccaatcagcagcatcaagatcaagcccgtggtcttgtgctgcctggttataactatctcggacccggaaacggtctcgatcgaggagagcctgtcaacagggcagacgaggtcgcgcgagagcacgacatctcgtacaacgagcagcttgaggcgggagacaacccctacctcaagtacaaccacgcggacgccgagtttcaggagaagctcgccgacgacacatccttcgggggaaacctcggaaaggcagtctttcaggccaagaaaagggttctcgaaccttttggcctggttgaagagggtgctaagacggcccctaccggaaagcggatagacgaccactttccaaaaagaaagaaggctcggaccgaagaggactccaagccttccacctcgtcagacgccgaagctggacccagcggatcccagcagctgcaaatcccagcccaaccagcctcaagtttgggagctgatacaatgtctgcgggaggtggcggcccattgggcgacaataaccaaggtgccgatggagtgggcaatgcctcgggagattggcattgcgattccacgtggatgggggacagagtcgtcaccaagtccacccgaacctgggtgctgcccagctacaacaaccaccagtaccgagagatcaaaagcggctccgtcgacggaagcaacgccaacgcctactttggatacagcaccccctgggggtactttgactttaaccgcttccacagccactggagcccccgagactggcaaagactcatcaacaactactggggcttcagaccccggtccctcagagtcaaaatcttcaacattcaagtcaaagaggtcacggtgcaggactccaccaccaccatcgccaacaacctcacctccaccgtccaagtgtttacggacgacgactaccagctgccctacgtcgtcggcaacgggaccgagggatgcctgccggccttccctccgcaggtctttacgctgccgcagtacggttacgcgacgctgaaccgcgacaacacagaaaatcccaccgagaggagcagcttcttctgcctagagtactttcccagcaagatgctgagaacgggcaacaactttgagtttacctacaactttgaggaggtgcccttccactccagcttcgctcccagtcagaacctgttcaagctggccaacccgctggtggaccagtacttgtaccgcttcgtgagcacaaataacactggcggagtccagttcaacaagaacctggccgggagatacgccaacacctacaaaaactggttcccggggcccatgggccgaacccagggctggaacctgggctccggggtcaaccgcgccagtgtcagcgccttcgccacgaccaataggatggagctcgagggcgcgagttaccaggtgcccccgcagccgaacggcatgaccaacaacctccagggcagcaacacctatgccctggagaacactatgatcttcaacagccagccggcgaacccgggcaccaccgccacgtacctcgagggcaacatgctcatcaccagcgagagcgagacgcagccggtgaaccgcgtggcgtacaacgtcggcgggcagatggccaccaacaaccagagctccaccactgcccccgcgaccggcacgtacaacctccaggaaatcgtgcccggcagcgtgtggatggagagggacgtgtacctccaaggacccatctgggccaagatcccagagacgggggcgcactttcacccctctccggccatgggcggattcggactcaaacacccaccgcccatgatgctcatcaagaacacgcctgtgcccggaaatatcaccagcttctcggacgtgcccgtcagcagcttcatcacccagtacagcaccgggcaggtcaccgtggagatggagtgggagctcaagaaggaaaactccaagaggtggaacccagagatccagtacacaaacaactacaacgacccccagtttgtggactttgccccggacagcaccggggaatacagaaccaccagacctatcggaacccgataccttacccgacccctttaa

SEQ ID NO: 106 - DNA, 2208 bp, Artificial Sequence
  source: /note="Description of Artificial Sequence: Synthetic polynucleotide"
atggctgccgatggttatcttccagattggctcgaggacaacctctctgagggcattcgcgagtggtgggacttgaaacctggagccccgaaacccaaagccaaccagcaaaagcaggacgacggccggggtctggtgcttcctggctacaagtacctcggacccttcaacggactcgacaagggggagcccgtcaacgcggcggatgcagcggccctcgagcacgacaaggcctacgaccagcagctcaaagcgggtgacaatccgtacctgcggtataaccacgccgacgccgagtttcaggagcgtctgcaagaagatacgtcttttgggggcaacctcgggcgagcagtcttccaggccaagaagagggttctcgaaccttttggtctggttgaggaaggtgctaagacggctcctggaaagaaacgtccggtagagcagtcgccacaagagccagactcctcctcgggcattggcaagacaggccagcagcccgctaaaaagagactcaattttggtcagactggcgactcagagtcagtccccgacccacaacctctcggagaacctccagcaacccccgctgctgtgggacctactacaatggcttcaggcggtggcgcaccaatggcagacaataacgaaggcgccgacggagtgggtaatgcctcaggaaattggcattgcgattccacatggctgggcgacagagtcatcaccaccagcacccgaacatgggccttgcccacctataacaaccacctctacaagcaaatctccagtgcttcaacgggggccagcaacgacaaccactacttcggctacagcaccccctgggggtattttgatttcaacagattccactgccatttctcaccacgtgactggcagcgactcatcaacaacaattggggattccggcccaagagactcaacttcaagctcttcaacatccaagtcaaggaggtcacgacgaatgatggcgtcacgaccatcgctaataaccttaccagcacggttcaagtcttctcggactcggagtaccagttgccgtacgtcctcggctctgcgcaccagggctgcctccctccgttcccggcggacgtgttcatgattccgcagtacggctacctaacgctcaacaatggcagccaggcagtgggacggtcatccttttactgcctggaatatttcccatcgcagatgctgagaacgggcaataactttaccttcagctacaccttcgaggacgtgcctttccacagcagctacgcgcacagccagagcctggaccggctgatgaatcctctcatcgaccagtacctgtattacctgaacagaactcagaatcagtccggaagtgcccaaaacaaggacttgctgtttagccgggggtctccagctggcatgtctgttcagcccaaaaactggctacctggaccctgttaccggcagcagcgcgtttctaaaacaaaaacagacaacaacaacagcaactttacctggactggtgcttcaaaatataaccttaatgggcgtgaatctataatcaaccctggcactgctatggcctcacacaaagacgacaaagacaagttctttcccatgagcggtgtcatgatttttggaaaggagagcgccggagcttcaaacactgcattggacaatgtcatgatcacagacgaagaggaaatcaaagccactaaccccgtggccaccgaaagatttgggactgtggcagtcaatctccagagcagcagcacagaccctgcgaccggagatgtgcatgttatgggagccttacctggaatggtgtggcaagacagagacgtatacctgcagggtcctatttgggccaaaattcctcacacggatggacactttcacccgtctcctctcatgggcggctttggacttaagcacccgcctcctcagatcctcatcaaaaacacgcctgttcctgcgaatcctccggcagagttttcggctacaaagtttgcttcattcatcacccagtattccacaggacaagtgagcgtggagattgaatgggagctgcagaaagaaaacagcaaacgctggaatcccgaagtgcagtatacatctaactatgcaaaatctgccaacgttgatttcactgtggacaacaatggactttatactgagcctcgccccattggcacccgttacctcacccgtcccctg

SEQ ID NO: 107 - protein, 736 aa, Adeno-associated virus 6
MAADGYLPDWLEDNLSEGIREWWDLKPGAPKPKANQQKQDDGRGLVLPGYKYLGPFNGLDKGEPVNAADAAALEHDKAYDQQLKAGDNPYLRYNHADAEFQERLQEDTSFGGNLGRAVFQAKKRVLEPFGLVEEGAKTAPGKKRPVEQSPQEPDSSSGIGKTGQQPAKKRLNFGQTGDSESVPDPQPLGEPPATPAAVGPTTMASGGGAPMADNNEGADGVGNASGNWHCDSTWLGDRVITTSTRTWALPTYNNHLYKQISSASTGASNDNHYFGYSTPWGYFDFNRFHCHFSPRDWQRLINNNWGFRPKRLNFKLFNIQVKEVTTNDGVTTIANNLTSTVQVFSDSEYQLPYVLGSAHQGCLPPFPADVFMIPQYGYLTLNNGSQAVGRSSFYCLEYFPSQMLRTGNNFTFSYTFEDVPFHSSYAHSQSLDRLMNPLIDQYLYYLNRTQNQSGSAQNKDLLFSRGSPAGMSVQPKNWLPGPCYRQQRVSKTKTDNNNSNFTWTGASKYNLNGRESIINPGTAMASHKDDKDKFFPMSGVMIFGKESAGASNTALDNVMITDEEEIKATNPVATERFGTVAVNLQSSSTDPATGDVHVMGALPGMVWQDRDVYLQGPIWAKIPHTDGHFHPSPLMGGFGLKHPPPQILIKNTPVPANPPAEFSATKFASFITQYSTGQVSVEIEWELQKENSKRWNPEVQYTSNYAKSANVDFTVDNNGLYTEPRPIGTRYLTRPL

SEQ ID NO: 108 - protein, 623 aa, Adeno-associated virus 6
MPGFYEIVIKVPSDLDEHLPGISDSFVNWVAEKEWELPPDSDMDLNLIEQAPLTVAEKLQRDFLVQWRRVSKAPEALFFVQFEKGESYFHLHILVETTGVKSMVLGRFLSQIRDKLVQTIYRGIEPTLPNWFAVTKTRNGAGGGNKVVDECYIPNYLLPKTQPELQWAWTNMEEYISACLNLAERKRLVAHDLTHVSQTQEQNKENLNPNSDAPVIRSKTSARYMELVGWLVDRGITSEKQWIQEDQASYISFNAASNSRSQIKAALDNAGKIMALTKSAPDYLVGPAPPADIKTNRIYRILELNGYDPAYAGSVFLGWAQKRFGKRNTIWLFGPATTGKTNIAEAIAHAVPFYGCVNWTNENFPFNDCVDKMVIWWEEGKMTAKVVESAKAILGGSKVRVDQKCKSSAQIDPTPVIVTSNTNMCAVIDGNSTTFEHQQPLQDRMFKFELTRRLEHDFGKVTKQEVKEFFRWAQDHVTEVAHEFYVRKGGANKRPAPDDADKSEPKRACPSVADPSTSDAEGAPVDFADRYQNKCSRHAGMLQMLFPCKTCERMNQNFNICFTHGTRDCSECFPGVSESQPVVRKRTYRKLCAIHHLLGRAPEIACSACDLVNVDLDDCVSEQ

SEQ ID NO: 109 - DNA, 4683 bp, Adeno-associated virus 6
ttggccactccctctctgcgcgctcgctcgctcactgaggccgggcgaccaaaggtcgcccgacgcccgggctttgcccgggcggcctcagtgagcgagcgagcgcgcagagagggagtggccaactccatcactaggggttcctggaggggtggagtcgtgacgtgaattacgtcatagggttagggaggtcctgtattagaggtcacgtgagtgttttgcgacattttgcgacaccatgtggtcacgctgggtatttaagcccgagtgagcacgcagggtctccattttgaagcgggaggtttgaacgcgcagcgccatgccggggttttacgagattgtgattaaggtccccagcgaccttgacgagcatctgcccggcatttctgacagctttgtgaactgggtggccgagaaggaatgggagttgccgccagattctgacatggatctgaatctgattgagcaggcacccctgaccgtggccgagaagctgcagcgcgacttcctggtccagtggcgccgcgtgagtaaggccccggaggccctcttctttgttcagttcgagaagggcgagtcctacttccacctccatattctggtggagaccacgggggtcaaatccatggtgctgggccgcttcctgagtcagattagggacaagctggtgcagaccatctaccgcgggatcgagccgaccctgcccaactggttcgcggtgaccaagacgcgtaatggcgccggaggggggaacaaggtggtggacgagtgctacatccccaactacctcctgcccaagactcagcccgagctgcagtgggcgtggactaacatggaggagtatataagcgcgtgtttaaacctggccgagcgcaaacggctcgtggcgcacgacctgacccacgtcagccagacccaggagcagaacaaggagaatctgaaccccaattctgacgcgcctgtcatccggtcaaaaacctccgcacgctacatggagctggtcgggtggctggtggaccggggcatcacctccgagaagcagtggatccaggaggaccaggcctcgtacatctccttcaacgccgcctccaactcgcggtcccagatcaaggccgctctggacaatgccggcaagatcatggcgctgaccaaatccgcgcccgactacctggtaggccccgctccgcccgccgacattaaaaccaaccgcatttaccgcatcctggagctgaacggctacgaccctgcctacgccggctccgtctttctcggctgggcccagaaaaggttcggaaaacgcaacaccatctggctgtttgggccggccaccacgggcaagaccaacatcgcggaagccatcgcccacgccgtgcccttctacggctgcgtcaactggaccaatgagaactttcccttcaacgattgcgtcgacaagatggtgatctggtgggaggagggcaagatgacggccaaggtcgtggagtccgccaaggccattctcggcggcagcaaggtgcgcgtggaccaaaagtgcaagtcgtccgcccagatcgatcccacccccgtgatcgtcacctccaacaccaacatgtgcgccgtgattgacgggaacagcaccaccttcgagcaccagcagccgttgcaggaccggatgttcaaatttgaactcacccgccgtctggagcatgactttggcaaggtgacaaagcaggaagtcaaagagttcttccgctgggcgcaggatcacgtgaccgaggtggcgcatgagttctacgtcagaaagggtggagccaacaagagacccgcccccgatgacgcggataaaagcgagcccaagcgggcctgcccctcagtcgcggatccatcgacgtcagacgcggaaggagctccggtggactttgccgacaggtaccaaaacaaatgttctcgtcacgcgggcatgcttcagatgctgtttccctgcaaaacatgcgagagaatgaatcagaatttcaacatttgcttcacgcacgggaccagagactgttcagaatgtttccccggcgtgtcagaatctcaaccggtcgtcagaaagaggacgtatcggaaactctgtgccattcatcatctgctggggcgggctcccgagattgcttgctcggcctgcgatctggtcaacgtggatctggatgactgtgtttctgagcaataaatgacttaaaccaggtatggctgccgatggttatcttccagattggctcgaggacaacctctctgagggcattcgcgagtggtgggacttgaaacctggagccccgaaacccaaagccaaccagcaaaagcaggacgacggccggggtctggtgcttcctggctacaagtacctcggacccttcaacggactcgacaagggggagcccgtcaacgcggcggatgcagcggccctcgagcacgacaaggcctacgaccagcagctcaaagcgggtgacaatccgtacctgcggtataaccacgccgacgccgagtttcaggagcgtctgcaagaagatacgtcttttgggggcaacctcgggcgagcagtcttccaggccaagaagagggttctcgaaccttttggtctggttgaggaaggtgctaagacggctcctggaaagaaacgtccggtagagcagtcgccacaagagccagactcctcctcgggcattggcaagacaggccagcagcccgctaaaaagagactcaattttggtcagactggcgactcagagtcagtccccgacccacaacctctcggagaacctccagcaacccccgctgctgtgggacctactacaatggcttcaggcggtggcgcaccaatggcagacaataacgaaggcgccgacggagtgggtaatgcctcaggaaattggcattgcgattccacatggctgggcgacagagtcatcaccaccagcacccgaacatgggccttgcccacctataacaaccacctctacaagcaaatctccagtgcttcaacgggggccagcaacgacaaccactacttcggctacagcaccccctgggggtattttgatttcaacagattccactgccatttctcaccacgtgactggcagcgactcatcaacaacaattggggattccggcccaagagactcaacttcaagctcttcaacatccaagtcaaggaggtcacgacgaatgatggcgtcacgaccatcgctaataaccttaccagcacggttcaagtcttctcggactcggagtaccagttgccgtacgtcctcggctctgcgcaccagggctgcctccctccgttcccggcggacgtgttcatgattccgcagtacggctacctaacgctcaacaatggcagccaggcagtgggacggtcatccttttactgcctggaatatttcccatcgcagatgctgagaacgggcaataactttaccttcagctacaccttcgaggacgtgcctttccacagcagctacgcgcacagccagagcctggaccggctgatgaatcctctcatcgaccagtacctgtattacctgaacagaactcagaatcagtccggaagtgcccaaaacaaggacttgctgtttagccgggggtctccagctggcatgtctgttcagcccaaaaactggctacctggaccctgttaccggcagcagcgcgtttctaaaacaaaaacagacaacaacaacagcaactttacctggactggtgcttcaaaatataaccttaatgggcgtgaatctataatcaaccctggcactgctatggcctcacacaaagacgacaaagacaagttctttcccatgagcggtgtcatgatttttggaaaggagagcgccggagcttcaaacactgcattggacaatgtcatgatcacagacgaagaggaaatcaaagccactaaccccgtggccaccgaaagatttgggactgtggcagtcaatctccagagcagcagcacagaccctgcgaccggagatgtgcatgttatgggagccttacctggaatggtgtggcaagacagagacgtatacctgcagggtcctatttgggccaaaattcctcacacggatggacactttcacccgtctcctctcatgggcggctttggacttaagcacccgcctcctcagatcctcatcaaaaacacgcctgttcctgcgaatcctccggcagagttttcggctacaaagtttgcttcattcatcacccagtattccacaggacaagtgagcgtggagattgaatgggagctgcagaaagaaaacagcaaacgctggaatcccgaagtgcagtatacatctaactatgcaaaatctgccaacgttgatttcactgtggacaacaatggactttatactgagcctcgccccattggcacccgttacctcacccgtcccctgtaattgtgtgttaatcaataaaccggttaattcgtgtcagttgaactttggtctcatgtcgttattatcttatctggtcaccatagcaaccggttacacattaactgcttagttgcgcttcgcgaatacccctagtgatggagttgcccactccctctatgcgcgctcgctcgctcggtggggccggcagagcagagctctgccgtctgcggacctttggtccgcaggccccaccgagcgagcgagcgcgcatagagggagtgggcaa

SEQ ID NO: 110 - DNA, 2211 bp, Artificial Sequence
  source: /note="Description of Artificial Sequence: Synthetic polynucleotide"
atggctgccgatggttatcttccagattggctcgaggacaacctctctgagggcattcgcgagtggtgggacttgaaacctggagccccgaaacccaaagccaaccagcaaaagcaggacgacggccggggtctggtgcttcctggctacaagtacctcggacccttcaacggactcgacaagggggagcccgtcaacgcggcggatgcagcggccctcgagcacgacaaggcctacgaccagcagctcaaagcgggtgacaatccgtacctgcggtataaccacgccgacgccgagtttcaggagcgtctgcaagaagatacgtcttttgggggcaacctcgggcgagcagtcttccaggccaagaagagggttctcgaaccttttggtctggttgaggaaggtgctaagacggctcctggaaagaaacgtccggtagagcagtcgccacaagagccagactcctcctcgggcattggcaagacaggccagcagcccgctaaaaagagactcaattttggtcagactggcgactcagagtcagtccccgacccacaacctctcggagaacctccagcaacccccgctgctgtgggacctactacaatggcttcaggcggtggcgcaccaatggcagacaataacgaaggcgccgacggagtgggtaatgcctcaggaaattggcattgcgattccacatggctgggcgacagagtcatcaccaccagcacccgaacatgggccttgcccacctataacaaccacctctacaagcaaatctccagtgcttcaacgggggccagcaacgacaaccactacttcggctacagcaccccctgggggtattttgatttcaacagattccactgccatttctcaccacgtgactggcagcgactcatcaacaacaattggggattccggcccaagagactcaacttcaagctcttcaacatccaagtcaaggaggtcacgacgaatgatggcgtcacgaccatcgctaataaccttaccagcacggttcaagtcttctcggactcggagtaccagttgccgtacgtcctcggctctgcgcaccagggctgcctccctccgttcccggcggacgtgttcatgattccgcagtacggctacctaacgctcaacaatggcagccaggcagtgggacggtcatccttttactgcctggaatatttcccatcgcagatgctgagaacgggcaataactttaccttcagctacaccttcgaggacgtgcctttccacagcagctacgcgcacagccagagcctggaccggctgatgaatcctctcatcgaccagtacctgtattacctgaacagaactcagaatcagtccggaagtgcccaaaacaaggacttgctgtttagccgggggtctccagctggcatgtctgttcagcccaaaaactggctacctggaccctgttaccggcagcagcgcgtttctaaaacaaaaacagacaacaacaacagcaactttacctggactggtgcttcaaaatataaccttaatgggcgtgaatctataatcaaccctggcactgctatggcctcacacaaagacgacaaagacaagttctttcccatgagcggtgtcatgatttttggaaaggagagcgccggagcttcaaacactgcattggacaatgtcatgatcacagacgaagaggaaatcaaagccactaaccccgtggccaccgaaagatttgggactgtggcagtcaatctccagagcagcagcacagaccctgcgaccggagatgtgcatgttatgggagccttacctggaatggtgtggcaagacagagacgtatacctgcagggtcctatttgggccaaaattcctcacacggatggacactttcacccgtctcctctcatgggcggctttggacttaagcacccgcctcctcagatcctcatcaaaaacacgcctgttcctgcgaatcctccggcagagttttcggctacaaagtttgcttcattcatcacccagtattccacaggacaagtgagcgtggagattgaatgggagctgcagaaagaaaacagcaaacgctggaatcccgaagtgcagtatacatctaactatgcaaaatctgccaacgttgatttcactgtggacaacaatggactttatactgagcctcgccccattggcacccgttacctcacccgtcccctgtaa

SEQ ID NO: 111 - protein, 736 aa, Artificial Sequence; identical to SEQ ID NO: 107
  source: /note="Description of Artificial Sequence: Synthetic polypeptide"

SEQ ID NO: 112 - protein, 736 aa, Artificial Sequence
  source: /note="Description of Artificial Sequence: Synthetic polypeptide"
MAADGYLPDWLEDNLSEGIREWWDLKPGAPKPKANQQKQDDGRGLVLPGYKYLGPFNGLDKGEPVNAADAAALEHDKAYDQQLKAGDNPYLRYNHADAEFQERLQEDTSFGGNLGRAVFQAKKRVLEPFGLVEEGAKTAPGKKRPVEQSPQEPDSSSGIGKTGQQPAKKRLNFGQTGDSESVPDPQPLGEPPATPAAVGPTTMASGGGAPMADNNEGADGVGNASGNWHCDSTWLGDRVITTSTRTWALPTYNNHLYKQISSASTGASNDNHYFGYSTPWGYFDFNRFHCHFSPRDWQRLINNNWGFRPKRLNFKLFNIQVKEVTTNDGVTTIANNLTSTVQVFSDSEYQLPYVLGSAHQGCLPPFPADVFMIPQYGYLTLNNGSQAVGRSSFYCLEYFPSQMLRTGNNFTFSYTFEDVPFHSSYAHSQSLDRLMNPLIDQYLYYLNRTQNQSGSAQNKDLLFSRGSPAGMSVQPKNWLPGPCYRQQRVSKTKTDNNNSNFTWTGASKYNLNGRESIINPGTAMASHKDDEDKFFPMSGVMIFGKESAGASNTALDNVMITDEEEIKATNPVATERFGTVAVNLQSSSTDPATGDVHVMGALPGMVWQDRDVYLQGPIWAKIPHTDGHFHPSPLMGGFGLKHPPPQILIKNTPVPANPPAEFSATKFASFITQYSTGQVSVEIEWELQKENSKRWNPEVQYTSNYAKSANVDFTVDNNGLYTEPRPIGTRYLTRPL

SEQ ID NO: 113 - protein, 736 aa, Artificial Sequence
  source: /note="Description of Artificial Sequence: Synthetic polypeptide"
MAADGYLPDWLEDNLSEGIREWWDLKPGAPKPKANQQKQDDGRGLVLPGYKYLGPFNGLDKGEPVNAADAAALEHDKAYDQQLKAGDNPYLRYNHADAEFQERLQEDTSFGGNLGRAVFQAKKRVLEPLGLVEEGAKTAPGKKRPVEQSPQEPDSSSGIGKTGQQPAKKRLNFGQTGDSESVPDPQPLGEPPATPAAVGPTTMASGGGAPMADNNEGADGVGNASGNWHCDSTWLGDRVITTSTRTWALPTYNNHLYKQISSASTGASNDNHYFGYSTPWGYFDFNRFHCHFSPRDWQRLINNNWGFRPKRLNFKLFNIQVKEVTTNDGVTTIANNLTSTVQVFSDSEYQLPYVLGSAHQGCLPPFPADVFMIPQYGYLTLNNGSQAVGRSSFYCLEYFPSQMLRTGNNFTFSYTFEDVPFHSSYAHSQSLDRLMNPLIDQYLYYLNRTQNQSGSAQNKDLLFSRGSPAGMSVQPKNWLPGPCYRQQRVSKTKTDNNNSNFTWTGASKYNLNGRESIINPGTAMASHKDDEDKFFPMSGVMIFGKESAGASNTALDNVMITDEEEIKATNPVATERFGTVAVNLQSSSTDPATGDVHVMGALPGMVWQDRDVYLQGPIWAKIPHTDGHFHPSPLMGGFGLKHPPPQILIKNTPVPANPPAEFSATKFASFITQYSTGQVSVEIEWELQKENSKRWNPEVQYTSNYAKSANVDFTVDNNGLYTEPRPIGTRYLTRPL

SEQ ID NO: 114 - protein, 736 aa, Artificial Sequence
  source: /note="Description of Artificial Sequence: Synthetic polypeptide"
MAADGYLPDWLEDNLSEGIREWWDLKPGAPKPKANQQKQDDGRGLVLPGYKYLGPFNGLDKGEPVNAADAAALEHDKAYDQQLKAGDNPYLRYNHADAEFQERLQEDTSFGGNLGRAVFQAKKRVLEPLGLVEEGAKTAPGKKRPVEQSPQEPDSSSGIGKTGQQPAKKRLNFGQTGDSESVPDPQPLGEPPATPAAVGPTTMASGGGAPMADNNEGADGVGNASGNWHCDSTWLGDRVITTSTRTWALPTYNNHLYKQISSASTGASNDNHYFGYSTPWGYFDFNRFHCHFSPRDWQRLINNNWGFRPKRLNFKLFNIQVKEVTTNDGVTTIANNLTSTVQVFSDSEYQLPYVLGSAHQGCLPPFPADVFMIPQYGYLTLNNGSQAVGRSSFYCLEYFPSQMLRTGNNFTFSYTFEDVPFHSSYAHSQSLDRLMNPLIDQYLYYLNRTQNQSGSAQNKDLLFSRGSPAGMSVQPKNWLPGPCYRQQRVSKTKTDNNNSNFTWTGASKYNLNGRESIINPGTAMASHKDDKDKFFPMSGVMIFGKESAGASNTALDNVMITDEEEIKATNPVATERFGTVAVNLQSSSTDPATGDVHVMGALPGMVWQDRDVYLQGPIWAKIPHTDGHFHPSPLMGGFGLKHPPPQILIKNTPVPANPPAEFSATKFASFITQYSTGQVSVEIEWELQKENSKRWNPEVQYTSNYAKSANVDFTVDNNGLYTEPRPIGTRYLTRPL

SEQ ID NO: 115 - DNA, 2214 bp, Artificial Sequence
  source: /note="Description of Artificial Sequence: Synthetic polynucleotide"
atggctgccgatggttatcttccagattggctcgaggacaacctctctgagggcattcgcgagtggtgggacctgaaacctggagccccgaaacccaaagccaaccagcaaaagcaggacaacggccggggtctggtgcttcctggctacaagtacctcggacccttcaacggactcgacaagggggagcccgtcaacgcggcggacgcagcggccctcgagcacgacaaggcctacgaccagcagctcaaagcgggtgacaatccgtacctgcggtataaccacgccgacgccgagtttcaggagcgtctgcaagaagatacgtcatttgggggcaacctcgggcgagcagtcttccaggccaagaagcgggttctcgaacctctcggtctggttgaggaaggcgctaagacggctcctgcaaagaagagaccggtagagccgtcacctcagcgttcccccgactcctccacgggcatcggcaagaaaggccagcagcccgccagaaagagactcaatttcggtcagactggcgactcagagtcagtccccgaccctcaacctctcggagaacctccagcagcgccctctagtgtgggatctggtacagtggctgcaggcggtggcgcaccaatggcagacaataacgaaggtgccgacggagtgggtaatgcctcaggaaattggcattgcgattccacatggctgggcgacagagtcattaccaccagcacccgaacctgggccctgcccacctacaacaaccacctctacaagcaaatctccagtgaaactgcaggtagtaccaacgacaacacctacttcggctacagcaccccctgggggtattttgactttaacagattccactgccacttctcaccacgtgactggcagcgactcatcaacaacaactggggattccggcccaagaagctgcggttcaagctcttcaacatccaggtcaaggaggtcacgacgaatgacggcgttacgaccatcgctaataaccttaccagcacgattcaggtattctcggactcggaataccagctgccgtacgtcctcggctctgcgcaccagggctgcctgcctccgttcccggcggacgtcttcatgattcctcagtacggctacctgactctcaacaatggcagtcagtctgtgggacgttcctccttctactgcctggagtacttcccctctcagatgctgagaacgggcaacaactttgagttcagctacagcttcgaggacgtgcctttccacagcagctacgcacacagccagagcctggaccggctgatgaatcccctcatcgaccagtacttgtactacctggccagaacacagagtaacccaggaggcacagctggcaatcgggaactgcagttttaccagggcgggccttcaactatggccgaacaagccaagaattggttacctggaccttgcttccggcaacaaagagtctccaaaacgctggatcaaaacaacaacagcaactttgcttggactggtgccaccaaatatcacctgaacggcagaaactcgttggttaatcccggcgtcgccatggcaactcacaaggacgacgaggaccgctttttcccatccagcggagtcctgatttttggaaaaactggagcaactaacaaaactacattggaaaatgtgttaatgacaaatgaagaagaaattcgtcctactaatcctgtagccacggaagaatacgggatagtcagcagcaacttacaagcggctaatactgcagcccagacacaagttgtcaacaaccagggagccttacctggcatggtctggcagaaccgggacgtgtacctgcagggtcccatctgggccaagattcctcacacggatggcaactttcacccgtctcctttgatgggcggctttggacttaaacatccgcctcctcagatcctgatcaagaacactcccgttcccgctaatcctccggaggtgtttactcctgccaagtttgcttcgttcatcacacagtacagcaccggacaagtcagcgtggaaatcgagtgggagctgcagaaggaaaacagcaagcgctggaacccggagattcagtacacctccaactttgaaaagcagactggtgtggactttgccgttgacagccagggtgtttactctgagcctcgccctattggcactcgttacctcacccgtaatctgtaa

SEQ ID NO: 116 - protein, 738 aa, Artificial Sequence
  source: /note="Description of Artificial Sequence: Synthetic polypeptide"
MAADGYLPDWLEDNLSEGIREWWALKPGAPKPKANQQKQDDGRGLVLPGYKYLGPFNGLDKGEPVNAADAAALEHDKAYDQQLQAGDNPYLRYNHADAEFQERLQEDTSFGGNLGRAVFQAKKRVLEPLGLVEEGAKTAPGKKRPVEPSPQRSPDSSTGIGKKGQQPARKRLNFGQTGDSESVPDPQPLGEPPAAPSGVGPNTMAAGGGAPMADNNEGADGVGSSSGNWHCDSTWLGDRVITTSTRTWALPTYNNHLYKQISNGTSGGATNDNTYFGYSTPWGYFDFNRFHCHFSPRDWQRLINNNWGFRPKRLSFKLFNIQVKEVTQNEGTKTIANNLTSTIQVFTDSEYQLPYVLGSAHQGCLPPFPADVFMIPQYGYLTLNNGSQAVGRSSFYCLEYFPSQMLRTGNNFQFTYTFEDVPFHSSYAHSQSLDRLMNPLIDQYLYYLSRTQTTGGTANTQTLGFSQGGPNTMANQAKNWLPGPCYRQQRVSTTTGQNNNSNFAWTAGTKYHLNGRNSLANPGIAMATHKDDEERFFPSNGILIFGKQNAARDNADYSDVMLTSEEEIKTTNPVATEEYGIVADNLQQQNTAPQIGTVNSQGALPGMVWQNRDVYLQGPIWAKIPHTDGNFHPSPLMGGFGLKHPPPQILIKNTPVPADPPTTFNQSKLNSFITQYSTGQVSVEIEWELQKENSKRWNPEIQYTSNYYKSTSVDFAVNTEGVYSEPRPIGTRYLTRNL

SEQ ID NO: 117 - protein, 737 aa, Adeno-associated virus 7
MAADGYLPDWLEDNLSEGIREWWDLKPGAPKPKANQQKQDNGRGLVLPGYKYLGPFNGLDKGEPVNAADAAALEHDKAYDQQLKAGDNPYLRYNHADAEFQERLQEDTSFGGNLGRAVFQAKKRVLEPLGLVEEGAKTAPAKKRPVEPSPQRSPDSSTGIGKKGQQPARKRLNFGQTGDSESVPDPQPLGEPPAAPSSVGSGTVAAGGGAPMADNNEGADGVGNASGNWHCDSTWLGDRVITTSTRTWALPTYNNHLYKQISSETAGSTNDNTYFGYSTPWGYFDFNRFHCHFSPRDWQRLINNNWGFRPKKLRFKLFNIQVKEVTTNDGVTTIANNLTSTIQVFSDSEYQLPYVLGSAHQGCLPPFPADVFMIPQYGYLTLNNGSQSVGRSSFYCLEYFPSQMLRTGNNFEFSYSFEDVPFHSSYAHSQSLDRLMNPLIDQYLYYLARTQSNPGGTAGNRELQFYQGGPSTMAEQAKNWLPGPCFRQQRVSKTLDQNNNSNFAWTGATKYHLNGRNSLVNPGVAMATHKDDEDRFFPSSGVLIFGKTGATNKTTLENVLMTNEEEIRPTNPVATEEYGIVSSNLQAANTAAQTQVVNNQGALPGMVWQNRDVYLQGPIWAKIPHTDGNFHPSPLMGGFGLKHPPPQILIKNTPVPANPPEVFTPAKFASFITQYSTGQVSVEIEWELQKENSKRWNPEIQYTSNFEKQTGVDFAVDSQGVYSEPRPIGTRYLTRNL

SEQ ID NO: 118 - protein, 623 aa, Adeno-associated virus 7
MPGFYEIVIKVPSDLDEHLPGISDSFVNWVAEKEWELPPDSDMDLNLIEQAPLTVAEKLQRDFLVQWRRVSKAPEALFFVQFEKGESYFHLHVLVETTGVKSMVLGRFLSQIREKLVQTIYRGVEPTLPNWFAVTKTRNGAGGGNKVVDECYIPNYLLPKTQPELQWAWTNMEEYISACLNLAERKRLVAQHLTHVSQTQEQNKENLNPNSDAPVIRSKTSARYMELVGWLVDRGITSEKQWIQEDQASYISFNAASNSRSQIKAALDNAGKIMALTKSAPDYLVGPSLPADIKTNRIYRILELNGYDPAYAGSVFLGWAQKKFGKRNTIWLFGPATTGKTNIAEAIAHAVPFYGCVNWTNENFPFNDCVDKMVIWWEEGKMTAKVVESAKAILGGSKVRVDQKCKSSAQIDPTPVIVTSNTNMCAVIDGNSTTFEHQQPLQDRMFKFELTRRLEHDFGKVTKQEVKEFFRWASDHVTEVAHEFYVRKGGASKRPAPDDADISEPKRACPSVADPSTSDAEGAPVDFADRYQNKCSRHAGMIQMLFPCKTCERMNQNFNICFTHGVRDCLECFPGVSESQPVVRKKTYRKLCAIHHLLGRAPEIACSACDLVNVDLDDCVSEQ

SEQ ID NO: 119 - DNA, 4721 bp, Adeno-associated virus 7
ttggccactccctctatgcgcgctcgctcgctcggtggggcctgcggaccaaaggtccgcagacggcagagctctgctctgccggccccaccgagcgagcgagcgcgcatagagggagtggccaactccatcactaggggtaccgcgaagcgcctcccacgctgccgcgtcagcgctgacgtaaatcacgtcataggggagtggtcctgtattagctgtcacgtgagtgcttttgcgacattttgcgacaccacgtggccatttgaggtatatatggccgagtgagcgagcaggatctccattttgaccgcgaaatttgaacgagcagcagccatgccgggtttctacgagatcgtgatcaaggtgccgagcgacctggacgagcacctgccgggcatttctgactcgtttgtgaactgggtggccgagaaggaatgggagctgcccccggattctgacatggatctgaatctgatcgagcaggcacccctgaccgtggccgagaagctgcagcgcgacttcctggtccaatggcgccgcgtgagtaaggccccggaggccctgttctttgttcagttcgagaagggcgagagctacttccaccttcacgttctggtggagaccacgggggtcaagtccatggtgctaggccgcttcctgagtcagattcgggagaagctggtccagaccatctaccgcggggtcgagcccacgctgcccaactggttcgcggtgaccaagacgcgtaatggcgccggcggggggaacaaggtggtggacgagtgctacatccccaactacctcctgcccaagacccagcccgagctgcagtgggcgtggactaacatggaggagtatataagcgcgtgtttgaacctggccgaacgcaaacggctcgtggcgcagcacctgacccacgtcagccagacgcaggagcagaacaaggagaatctgaaccccaattctgacgcgcccgtgatcaggtcaaaaacctccgcgcgctacatggagctggtcgggtggctggtggaccggggcatcacctccgagaagcagtggatccaggaggaccaggcctcgtacatctccttcaacgccgcctccaactcgcggtcccagatcaaggccgcgctggacaatgccggcaagatcatggcgctgaccaaatccgcgcccgactacctggtggggccctcgctgcccgcggacattaaaaccaaccgcatctaccgcatcctggagctgaacgggtacgatcctgcctacgccggctccgtctttctcggctgggcccagaaaaagttcgggaagcgcaacaccatctggctgtttgggcccgccaccaccggcaagaccaacattgcggaagccatcgcccacgccgtgcccttctacggctgcgtcaactggaccaatgagaactttcccttcaacgattgcgtcgacaagatggtgatctggtgggaggagggcaagatgacggccaaggtcgtggagtccgccaaggccattctcggcggcagcaaggtgcgcgtggaccaaaagtgcaagtcgtccgcccagatcgaccccacccccgtgatcgtcacctccaacaccaacatgtgcgccgtgattgacgggaacagcaccaccttcgagcaccagcagccgttgcaggaccggatgttcaaatttgaactcacccgccgtctggagcacgactttggcaaggtgacgaagcaggaagtcaaagagttcttccgctgggccagtgatcacgtgaccgaggtggcgcatgagttctacgtcagaaagggcggagccagcaaaagacccgcccccgatgacgcggatataagcgagcccaagcgggcctgcccctcagtcgcggatccatcgacgtcagacgcggaaggagctccggtggactttgccgacaggtaccaaaacaaatgttctcgtcacgcgggcatgattcagatgctgtttccctgcaaaacgtgcgagagaatgaatcagaatttcaacatttgcttcacacacggggtcagagactgtttagagtgtttccccggcgtgtcagaatctcaaccggtcgtcagaaaaaagacgtatcggaaactctgcgcgattcatcatctgctggggcgggcgcccgagattgcttgctcggcctgcgacctggtcaacgtggacctggacgactgcgtttctgagcaataaatgacttaaaccaggtatggctgccgatggttatcttccagattggctcgaggacaacctctctgagggcattcgcgagtggtgggacctgaaacctggagccccgaaacccaaagccaaccagcaaaagcaggacaacggccggggtctggtgcttcctggctacaagtacctcggacccttcaacggactcgacaagggggagcccgtcaacgcggcggacgcagcggccctcgagcacgacaaggcctacgaccagcagctcaaagcgggtgacaatccgtacctgcggtataaccacgccgacgccgagtttcaggagcgtctgcaagaagatacgtcatttgggggcaacctcgggcgagcagtcttccaggccaagaagcgggttctcgaacctctcggtctggttgaggaaggcgctaagacggctcctgcaaagaagagaccggtagagccgtcacctcagcgttcccccgactcctccacgggcatcggcaagaaaggccagcagcccgccagaaagagactcaatttcggtcagactggcgactcagagtcagtccccgaccctcaacctctcggagaacctccagcagcgccctctagtgtgggatctggtacagtggctgcaggcggtggcgcaccaatggcagacaataacgaaggtgccgacggagtgggtaatgcctcaggaaattggcattgcgattccacatggctgggcgacagagtcattaccaccagcacccgaacctgggccctgcccacctacaacaaccacctctacaagcaaatctccagtgaaactgcaggtagtaccaacgacaacacctacttcggctacagcaccccctgggggtattttgactttaacagattccactgccacttctcaccacgtgactggcagcgactcatcaacaacaactggggattccggcccaagaagctgcggttcaagctcttcaacatccaggtcaaggaggtcacgacgaatgacggcgttacgaccatcgctaataaccttaccagcacgattcaggtattctcggactcggaataccagctgccgtacgtcctcggctctgcgcaccagggctgcctgcctccgttcccggcggacgtcttcatgattcctcagtacggctacctgactctcaacaatggcagtcagtctgtgggacgttcctccttctactgcctggagtacttcccctctcagatgctgagaacgggcaacaactttgagttcagctacagcttcgaggacgtgcctttccacagcagctacgcacacagccagagcctggaccggctgatgaatcccctcatcgaccagtacttgtactacctggccagaacacagagtaacccaggaggcacagctggcaatcgggaactgcagttttaccagggcgggccttcaactatggccgaacaagccaagaattggttacctggaccttgcttccggcaacaaagagtctccaaaacgctggatcaaaacaacaacagcaactttgcttggactggtgccaccaaatatcacctgaacggcagaaactcgttggttaatcccggcgtcgccatggcaactcacaaggacgacgaggaccgctttttcccatccagcggagtcctgatttttggaaaaactggagcaactaacaaaactacattggaaaatgtgttaatgacaaatgaagaagaaattcgtcctactaatcctgtagccacggaagaatacgggatagtcagcagcaacttacaagcggctaatactgcagcccagacacaagttgtcaacaaccagggagccttacctggcatggtctggcagaaccgggacgtgtacctgcagggtcccatctgggccaagattcctcacacggatggcaactttcacccgtctcctttgatgggcggctttggacttaaacatccgcctcctcagatcctgatcaagaacactcccgttcccgctaatcctccggaggtgtttactcctgccaagtttgcttcgttcatcacacagtacagcaccggacaagtcagcgtggaaatcgagtgggagctgcagaaggaaaacagcaagcgctggaacccggagattcagtacacctccaactttgaaaagcagactggtgtggactttgccgttgacagccagggtgtttactctgagcctcgccctattggcactcgttacctcacccgtaatctgtaattgcatgttaatcaataaaccggttgattcgtttcagttgaactttggtctcctgtgcttcttatcttatcggtttccatagcaactggttacacattaactgcttgggtgcgcttcacgataagaacactgacgtcaccgcggtacccctagtgatggagttggccactccctctatgcgcgctcgctcgctcggtggggcctgcggaccaaaggtccgcagacggcagagctctgctctgccggccccaccgagcgagcgagcgcgcatagagggagtggccaa

SEQ ID NO: 120 - DNA, 2214 bp, Artificial Sequence; identical to SEQ ID NO: 115
  source: /note="Description of Artificial Sequence: Synthetic polynucleotide"

SEQ ID NO: 121 - protein, 737 aa, Artificial Sequence; identical to SEQ ID NO: 117
  source: /note="Description of Artificial Sequence: Synthetic polypeptide"

SEQ ID NO: 122 - DNA, 2217 bp, Artificial Sequence
  source: /note="Description of Artificial Sequence: Synthetic polynucleotide"
atggctgccgatggttatcttccagattggctcgaggacaacctctctgagggcattcgcgagtggtgggcgctgaaacctggagccccgaagcccaaagccaaccagcaaaagcaggacgacggccggggtctggtgcttcctggctacaagtacctcggacccttcaacggactcgacaagggggagcccgtcaacgcggcggacgcagcggccctcgagcacgacaaggcctacgaccagcagctgcaggcgggtgacaatccgtacctgcggtataaccacgccgacgccgagtttcaggagcgtctgcaagaagatacgtcttttgggggcaacctcgggcgagcagtcttccaggccaagaagcgggttctcgaacctctcggtctggttgaggaaggcgctaagacggctcctggaaagaagagaccggtagagccatcaccccagcgttctccagactcctctacgggcatcggcaagaaaggccaacagcccgccagaaaaagactcaattttggtcagactggcgactcagagtcagttccagaccctcaacctctcggagaacctccagcagcgccctctggtgtgggacctaatacaatggctgcaggcggtggcgcaccaatggcagacaataacgaaggcgccgacggagtgggtagttcctcgggaaattggcattgcgattccacatggctgggcgacagagtcatcaccaccagcacccgaacctgggccctgcccacctacaacaaccacctctacaagcaaatctccaacgggacatcgggaggagccaccaacgacaacacctacttcggctacagcaccccctgggggtattttgactttaacagattccactgccacttttcaccacgtgactggcagcgactcatcaacaacaactggggattccggcccaagagactcagcttcaagctcttcaacatccaggtcaaggaggtcacgcagaatgaaggcaccaagaccatcgccaataacctcaccagcaccatccaggtgtttacggactcggagtaccagctgccgtacgttctcggctctgcccaccagggctgcctgcctccgttcccggcggacgtgttcatgattccccagtacggctacctaacactcaacaacggtagtcaggccgtgggacgctcctccttctactgcctggaatactttccttcgcagatgctgagaaccggcaacaacttccagtttacttacaccttcgaggacgtgcctttccacagcagctacgcccacagccagagcttggaccggctgatgaatcctctgattgaccagtacctgtactacttgtctcggactcaaacaacaggaggcacggcaaatacgcagactctgggcttcagccaaggtgggcctaatacaatggccaatcaggcaaagaactggctgccaggaccctgttaccgccaacaacgcgtctcaacgacaaccgggcaaaacaacaatagcaactttgcctggactgctgggaccaaataccatctgaatggaagaaattcattggctaatcctggcatcgctatggcaacacacaaagacgacgaggagcgtttttttcccagtaacgggatcctgatttttggcaaacaaaatgctgccagagacaatgcggattacagcgatgtcatgctcaccagcgaggaagaaatcaaaaccactaaccctgtggctacagaggaatacggtatcgtggcagataacttgcagcagcaaaacacggctcctcaaattggaactgtcaacagccagggggccttacccggtatggtctggcagaaccgggacgtgtacctgcagggtcccatctgggccaagattcctcacacggacggcaacttccacccgtctccgctgatgggcggctttggcctgaaacatcctccgcctcagatcctgatcaagaacacgcctgtacctgcggatcctccgaccaccttcaaccagtcaaagctgaactctttcatcacgcaatacagcaccggacaggtcagcgtggaaattgaatgggagctgcagaaggaaaacagcaagcgctggaaccccgagatccagtacacctccaactactacaaatctacaagtgtggactttgctgttaatacagaaggcgtgtactctgaaccccgccccattggcacccgttacctcacccgtaatctgtaa

SEQ ID NO: 123 - DNA, 2213 bp, Adeno-associated virus 8
atggctgccgatggttatcttccagattggctcgaggacaacctctctgagggcattcgcgagtggtgggcgctgaaacctggagccccgaagcccaaagccaaccagcaaaagcaggacgacggccggggtctggtgcttcctggctacaagtacctcggacccttcaacggactcgacaagggggagcccgtcaacgcggcggacgcagcggccctcgagcacgacaaggcctacgaccagcagctgcaggcgggtgacaatccgtacctgcggtataaccacgccgacgccgagtttcaggagcgtctgcaagaagatacgtcttttgggggcaacctcgggcgagcagtcttccaggccaagaagcgggttctcgaacctctcggtctggttgaggaaggcgctaagacggctcctggaaagaagagaccggtagagccatcaccccagcgttctccagactcctctacgggcatcggcaagaaaggccaacagcccgccagaaaaagactcaattttggtcagactggcgactcagagtcagttccagaccctcaacctctcggagaacctccagcagcgccctctggtgtgggacctaatacaatggctgcaggcggtggcgcaccaatggcagacaataacgaaggcgccgacggagtgggtagttcctcgggaaattggcattgcgattccacatggctgggcgacagagtcatcaccaccagcacccgaacctgggccctgcccacctacaacaaccacctctacaagcaaatctccaacgggacatcgggaggagccaccaacgacaacacctacttcggctacagcaccccctgggggtattttgactttaacagattccactgccacttttcaccacgtgactggcagcgactcatcaacaacaactggggattccggcccaagagactcagcttcaagctcttcaacatccaggtcaaggaggtcacgcagaatgaaggcaccaagaccatcgccaataacctcaccagcaccatccaggtgtttacggactcggagtaccagctgccgtacgttctcggctctgcccaccagggctgcctgcctccgttcccggcggacgtgttcatgattccccagtacggctacctaacactcaacaacggtagtcaggccgtgggacgctcctccttctactgcctggaatactttccttcgcagatgctgagaaccggcaacaacttccagtttacttacaccttcgaggacgtgcctttccacagcagctacgcccacagccagagcttggaccggctgatgaatcctctgattgaccagtacctgtactacttgtctcggactcaaacaacaggaggcacggcaaatacgcagactctgggcttcagccaaggtgggcctaatacaatggccaatcaggcaaagaactggctgccaggaccctgttaccgccaacaacgcgtctcaacgacaaccgggcaaaacaacaatagcaactttgcctggactgctgggaccaaataccatctgaatggaagaaattcattggctaatcctggcatcgctatggcaacacacaaagacgacgaggagcgtttttttcccagtaacgggatcctgatttttggcaaacaaaatgctgccagagacaatgcggattacagcgatgtcatgctcaccagcgaggaagaaatcaaaaccactaaccctgtggctacagaggaatacggtatcgtggcagataacttgcagcagcaaaacacggctcctcaaattggaactgtcaacagccagggggccttacccggtatggtctggcagaaccgggacgtgtacctgcagggtcccatctgggccaagattcctcacacggacggcaacttccacccgtctccgctgatgggcggctttggcctgaaacatcctccgcctcagatcctgatcaagaacacgcctgtacctgcggatcctccgaccaccttcaaccagtcaaagctgaactctttcatcacgcaatacagcaccggacaggtcagcgtggaaattgaatgggagctgcagaaggaaaacagcaagcgctggaaccccgagatccagtacacctccaactactacaaatctacaagtgtggactttgctgtaatacagaaggcgtgtactctgaaccccgccccattggcacccgttacctcacccgtaatctg

SEQ ID NO: 124 - DNA, 4393 bp, Adeno-associated virus 8
cagagagggagtggccaactccatcactaggggtagcgcgaagcgcctcccacgctgccgcgtcagcgctgacgtaaattacgtcataggggagtggtcctgtattagctgtcacgtgagtgcttttgcggcattttgcgacaccacgtggccatttgaggtatatatggccgagtgagcgagcaggatctccattttgaccgcgaaatttgaacgagcagcagccatgccgggcttctacgagatcgtgatcaaggtgccgagcgacctggacgagcacctgccgggcatttctgactcgtttgtgaactgggtggccgagaaggaatgggagctgcccccggattctgacatggatcggaatctgatcgagcaggcacccctgaccgtggccgagaagctgcagcgcgacttcctggtccaatggcgccgcgtgagtaaggccccggaggccctcttctttgttcagttcgagaagggcgagagctactttcacctgcacgttctggtcgagaccacgggggtcaagtccatggtgctaggccgcttcctgagtcagattcgggaaaagcttggtccagaccatctacccgcggggtcgagccccaccttgcccaactggttcgcggtgaccaaagacgcggtaatggcgccggcgggggggaacaaggtggtggacgagtgctacatccccaactacctcctgcccaagactcagcccgagctgcagtgggcgtggactaacatggaggagtatataagcgcgtgcttgaacctggccgagcgcaaacggctcgtggcgcagcacctgacccacgtcagccagacgcaggagcagaacaaggagaatctgaaccccaattctgacgcgcccgtgatcaggtcaaaaacctccgcgcgctatatggagctggtcgggtggctggtggaccggggcatcacctccgagaagcagtggatccaggaggaccaggcctcgtacatctccttcaacgccgcctccaactcgcggtcccagatcaaggccgcgctggacaatgccggcaagatcatggcgctgaccaaatccgcgcccgactacctggtggggccctcgctgcccgcggacattacccagaaccgcatctaccgcatcctcgctctcaacggctacgaccctgcctacgccggctccgtctttctcggctgggctcagaaaaagttcgggaaacgcaacaccatctggctgtttggacccgccaccaccggcaagaccaacattgcggaagccatcgcccacgccgtgcccttctacggctgcgtcaactggaccaatgagaactttcccttcaatgattgcgtcgacaagatggtgatctggtgggaggagggcaagatgacggccaaggtcgtggagtccgccaaggccattctcggcggcagcaaggtgcgcgtggaccaaaagtgcaagtcgtccgcccagatcgaccccacccccgtgatcgtcacctccaacaccaacatgtgcgccgtgattgacgggaacagcaccaccttcgagcaccagcagcctctccaggaccggatgtttaagttcgaactcacccgccgtctggagcacgactttggcaaggtgacaaagcaggaagtcaaagagttcttccgctgggccagtgatcacgtgaccgaggtggcgcatgagttttacgtcagaaagggcggagccagcaaaagacccgcccccgatgacgcggataaaagcgagcccaagcgggcctgcccctcagtcgcggatccatcgacgtcagacgcggaaggagctccggtggactttgccgacaggtaccaaaacaaatgttctcgtcacgcgggcatgcttcagatgctgtttccctgcaaaacgtgcgagagaatgaatcagaatttcaacatttgcttcacacacggggtcagagactgctcagagtgtttccccggcgtgtcagaatctcaaccggtcgtcagaaagaggacgtatcggaaactctgtgcgattcatcatctgctggggcgggctcccgagattgcttgctcggcctgcgatctggtcaacgtggacctggatgactgtgtttctgagcaataaatgacttaaaccaggtatggctgccgatggttatcttccagattggctcgaggacaacctctctgagggcattcgcgagtggtgggcgctgaaacctggagccccgaagcccaaagccaaccagcaaaagcaggacgacggccggggtctggtgcttcctggctacaagtacctcggacccttcaacggactcgacaagggggagcccgtcaacgcggcggacgcagcggccctcgagcacgacaaggcctacgaccagcagctgcaggcgggtgacaatccgtacctgcggtataaccacgccgacgccgagtttcaggagcgtctgcaagaagatacgtcttttgggggcaacctcgggcgagcagtcttccaggccaagaagcgggttctcgaacctctcggtctggttgaggaaggcgctaagacggctcctggaaagaagagaccggtagagccatcaccccagcgttctccagactcctctacgggcatcggcaagaaaggccaacagcccgccagaaaaagactcaattttggtcagactggcgactcagagtcagttccagaccctcaacctctcggagaacctccagcagcgccctctggtgtgggacctaatacaatggctgcaggcggtggcgcaccaatggcagacaataacgaaggcgccgacggagtgggtagttcctcgggaaattggcattgcgattccacatggctgggcgacagagtcatcaccaccagcacccgaacctgggccctgcccacctacaacaaccacctctacaagcaaatctccaacgggacatcgggaggagccaccaacgacaacacctacttcggctacagcaccccctgggggtattttgactttaacagattccactgccacttttcaccacgtgactggcagcgactcatcaacaacaactggggattccggcccaagagactcagcttcaagctcttcaacatccaggtcaaggaggtcacgcagaatgaaggcaccaagaccatcgccaataacctcaccagcaccatccaggtgtttacggactcggagtaccagctgccgtacgttctcggctctgcccaccagggctgcctgcctccgttcccggcggacgtgttcatgattccccagtacggctacctaacactcaacaacggtagtcaggccgtgggacgctcctccttctactgcctggaatactttccttcgcagatgctgagaaccggcaacaacttccagtttacttacaccttcgaggacgtgcctttccacagcagctacgcccacagccagagcttggaccggctgatgaatcctctgattgaccagtacctgtactacttgtctcggactcaaacaacaggaggcacggcaaatacgcagactctgggcttcagccaaggtgggcctaatacaatggccaatcaggcaaagaactggctgccaggaccctgttaccgccaacaacgcgtctcaacgacaaccgggcaaaacaacaatagcaactttgcctggactgctgggaccaaataccatctgaatggaagaaattcattggctaatcctggcatcgctatggcaacacacaaagacgacgaggagcgtttttttcccagtaacgggatcctgatttttggcaaacaaaatgctgccagagacaatgcggattacagcgatgtcatgctcaccagcgaggaagaaatcaaaaccactaaccctgtggctacagaggaatacggtatcgtggcagataacttgcagcagcaaaacacggctcctcaaattggaactgtcaacagccagggggccttacccggtatggtctggcagaaccgggacgtgtacctgcagggtcccatctgggccaagattcctcacacggacggcaacttccacccgtctccgctgatgggcggctttggcctgaaacatcctccgcctcagatcctgatcaagaacacgcctgtacctgcggatcctccgaccaccttcaaccagtcaaagctgaactctttcatcacgcaatacagcaccggacaggtcagcgtggaaattgaatgggagctgcagaaggaaaacagcaagcgctggaaccccgagatccagtacacctccaactactacaaatctacaagtgtggactttgctgttaatacagaaggcgtgtactctgaaccccgccccattggcacccgttacctcacccgtaatctgtaattgcctgttaatcaataaaccggttgattcgtttcagttgaactttggtctctgcg

SEQ ID NO: 125 - protein, 738 aa, Adeno-associated virus 8; identical to SEQ ID NO: 116

SEQ ID NO: 126 - protein, 737 aa, Adeno-associated virus 8
MAADGYLPDWLEDNLSEGIREWWALKPGAPKPKANQQKQDDGRGLVLPGYKYLGPFNGLDKGEPVNAADAAALEHDKAYDQQLQAGDNPYLRYNHADAEFQERLQEDTSFGGNLGRAVFQAKKRVLEPLGLVEEGAKTAPGKKRPVEPSPQRSPDSSTGIGKKGQQPARKRLNFGQTGDSESVPDPQPLGEPPAAPSGVGPNTMAAGGGAPMADNNEGADGVGSSSGNWHCDSTWLGDRVITTSTRTWALPTYNNHLYKQISNGTSGGATNDNTYFGYSTPWGYFDFNRFHCHFSPRDWQRLINNNWGFRPKRLSFKLFNIQVKEVTQNEGTKTIANNLTSTIQVFTDSEYQLPYVLGSAHQGCLPPFPADVFMIPQYGYLTLNNGSQAVGRSSFYCLEYFPSQMLRTGNNFQFTYTFEDVPFHSSYAHSQSLDRLMNPLIDQYLYYLSRTQTTGGTANTQTLGFSQGGPNTMANQAKNWLPGPCYRQQRVSTTTGQNNNSNFAWTAGTKYHLNGRNSLANPGIAMATHKDDEERFFPSNGILIFGKQNAARDNADYSDVMLTSEEEIKTTNPVATEEYGIVADNLQQQNTAPQIGTVNSQGALPGMVWQNRDVYLQGPIWAKIPHTDGNFHPSPLMGGFGLKHPPPQILIKNTPVPADPPTTFNQSKLNSFITQYSTGQVSVEIEWELQKENSKRWNPEIQYTSNYYKSTSVDFAVIQKACTLNPAPLAPVTSPVI

SEQ ID NO: 127 - DNA, 2217 bp, Artificial Sequence; identical to SEQ ID NO: 122
  source: /note="Description of Artificial Sequence: Synthetic polynucleotide"

SEQ ID NO: 128 - DNA, 2214 bp, Artificial Sequence
  source: /note="Description of Artificial Sequence: Synthetic polynucleotide"
atggctgccgatggttatcttccagattggctcgaggacaacctctctgagggcattcgcgagtggtgggcgctgaaacctggagccccgaagcccaaagccaaccagcaaaagcaggacgacggccggggtctggtgcttcctggctacaagtacctcggacccttcaacggactcgacaagggggagcccgtcaacgcggcggacgcagcggccctcgagcacgacaaggcctacgaccagcagctgcaggcgggtgacaatccgtacctgcggtataaccacgccgacgccgagtttcaggagcgtctgcaagaagatacgtcttttgggggcaacctcgggcgagcagtcttccaggccaagaagcgggttctcgaacctctcggtctggttgaggaaggcgctaagacggctcctggaaagaagagaccggtagagccatcaccccagcgttctccagactcctctacgggcatcggcaagaaaggccaacagcccgccagaaaaagactcaattttggtcagactggcgactcagagtcagttccagaccctcaacctctcggagaacctccagcagcgccctctggtgtgggacctaatacaatggctgcaggcggtggcgcaccaatggcagacaataacgaaggcgccgacggagtgggtagttcctcgggaaattggcattgcgattccacatggctgggcgacagagtcatcaccaccagcacccgaacctgggccctgcccacctacaacaaccacctctacaagcaaatctccaacgggacatcgggaggagccaccaacgacaacacctacttcggctacagcaccccctgggggtattttgactttaacagattccactgccacttttcaccacgtgactggcagcgactcatcaacaacaactggggattccggcccaagagactcagcttcaagctcttcaacatccaggtcaaggaggtcacgcagaatgaaggcaccaagaccatcgccaataacctcaccagcaccatccaggtgtttacggactcggagtaccagctgccgtacgttctcggctctgcccaccagggctgcctgcctccgttcccggcggacgtgttcatgattccccagtacggctacctaacactcaacaacggtagtcaggccgtgggacgctcctccttctactgcctggaatactttccttcgcagatgctgagaaccggcaacaacttccagtttacttacaccttcgaggacgtgcctttccacagcagctacgcccacagccagagcttggaccggctgatgaatcctctgattgaccagtacctgtactacttgtctcggactcaaacaacaggaggcacggcaaatacgcagactctgggcttcagccaaggtgggcctaatacaatggccaatcaggcaaagaactggctgccaggaccctgttaccgccaacaacgcgtctcaacgacaaccgggcaaaacaacaatagcaactttgcctggactgctgggaccaaataccatctgaatggaagaaattcattggctaatcctggcatcgctatggcaacacacaaagacgacgaggagcgtttttttcccagtaacgggatcctgatttttggcaaacaaaatgctgccagagacaatgcggattacagcgatgtcatgctcaccagcgaggaagaaatcaaaaccactaaccctgtggctacagaggaatacggtatcgtggcagataacttgcctgagcggacggcgatgagtcttccgggaactgtcaacagccagggggccttacccggtatggtctggcagaaccgggacgtgtacctgcagggtcccatctgggccaagattcctcacacggacggcaacttccacccgtctccgctgatgggcggctttggcctgaaacatcctccgcctcagatcctgatcaagaacacgcctgtacctgcggatcctccgaccaccttcaaccagtcaaagctgaactctttcatcacgcaatacagcaccggacaggtcagcgtggaaattgaatgggagctgcagaaggaaaacagcaagcgctggaaccccgagatccagtacacctccaactactacaaatctacaagtgtggactttgctgttaatacagaaggcgtgtactctgaaccccgccccattggcacccgttacctcacccgtaatctg

SEQ ID NO: 129 - protein, 738 aa, Artificial Sequence
  source: /note="Description of Artificial Sequence: Synthetic polypeptide"
MAADGYLPDWLEDNLSEGIREWWALKPGAPKPKANQQKQDDGRGLVLPGYKYLGPFNGLDKGEPVNAADAAALEHDKAYDQQLQAGDNPYLRYNHADAEFQERLQEDTSFGGNLGRAVFQAKKRVLEPLGLVEEGAKTAPGKKRPVEPSPQRSPDSSTGIGKKGQQPARKRLNFGQTGDSESVPDPQPLGEPPAAPSGVGPNTMAAGGGAPMADNNEGADGVGSSSGNWHCDSTWLGDRVITTSTRTWALPTYNNHLYKQISNGTSGGATNDNTYFGYSTPWGYFDFNRFHCHFSPRDWQRLINNNWGFRPKRLSFKLFNIQVKEVTQNEGTKTIANNLTSTIQVFTDSEYQLPYVLGSAHQGCLPPFPADVFMIPQYGYLTLNNGSQAVGRSSFYCLEYFPSQMLRTGNNFQFTYTFEDVPFHSSYAHSQSLDRLMNPLIDQYLYYLSRTQTTGGTANTQTLGFSQGGPNTMANQAKNWLPGPCYRQQRVSTTTGQNNNSNFAWTAGTKYHLNGRNSLANPGIAMATHKDDEERFFPSNGILIFGKQNAARDNADYSDVMLTSEEEIKTTNPVATEEYGIVADNLPERTAMSLPGTVNSQGALPGMVWQNRDVYLQGPIWAKIPHTDGNFHPSPLMGGFGLKHPPPQILIKNTPVPADPPTTFNQSKLNSFITQYSTGQVSVEIEWELQKENSKRWNPEIQYTSNYYKSTSVDFAVNTEGVYSEPRPIGTRYLTRNL

SEQ ID NO: 130 - DNA, 2214 bp, Artificial Sequence
  source: /note="Description of Artificial Sequence: Synthetic polynucleotide"
atggctgccgatggttatcttccagattggctcgaggacaacctctctgagggcattcgcgagtggtgggcgctgaaacctggagccccgaagcccaaagccaaccagcaaaagcaggacgacggccggggtctggtgcttcctggctacaagtacctcggacccttcaacggactcgacaagggggagcccgtcaacgcggcggacgcagcggccctcgagcacgacaaggcctacgaccagcagctgcaggcgggtgacaatccgtacctgcggtataaccacgccgacgccgagtttcaggagcgtctgcaagaagatacgtcttttgggggcaacctcgggcgagcagtcttccaggccaagaagcgggttctcgaacctctcggtctggttgaggaaggcgctaagacggctcctggaaagaagagaccggtagagccatcaccccagcgttctccagactcctctacgggcatcggcaagaaaggccaacagcccgccagaaaaagactcaattttggtcagactggcgactcagagtcagttccagaccctcaacctctcggagaacctccagcagcgccctctggtgtgggacctaatacaatggctgcaggcggtggcgcaccaatggcagacaataacgaaggcgccgacggagtgggtagttcctcgggaaattggcattgcgattccacatggctgggcgacagagtcatcaccaccagcacccgaacctgggccctgcccacctacaacaaccacctctacaagcaaatctccaacgggacatcgggaggagccaccaacgacaacacctacttcggctacagcaccccctgggggtattttgactttaacagattccactgccacttttcaccacgtgactggcagcgactcatcaacaacaactggggattccggcccaagagactcagcttcaagctcttcaacatccaggtcaaggaggtcacgcagaatgaaggcaccaagaccatcgccaataacctcaccagcaccatccaggtgtttacggactcggagtaccagctgccgtacgttctcggctctgcccaccagggctgcctgcctccgttcccggcggacgtgttcatgattccccagtacggctacctaacactcaacaacggtagtcaggccgtgggacgctcctccttctactgcctggaatactttccttcgcagatgctgagaaccggcaacaacttccagtttacttacaccttcgaggacgtgcctttccacagcagctacgcccacagccagagcttggaccggctgatgaatcctctgattgaccagtacctgtactacttgtctcggactcaaacaacaggaggcacggcaaatacgcagactctgggcttcagccaaggtgggcctaatacaatggccaatcaggcaaagaactggctgccaggaccctgttaccgccaacaacgcgtctcaacgacaaccgggcaaaacaacaatagcaactttgcctggactgctgggaccaaataccatctgaatggaagaaattcattggctaatcctggcatcgctatggcaacacacaaagacgacgaggagcgtttttttcccagtaacgggatcctgatttttggcaaacaaaatgctgccagagacaatgcggattacagcgatgtcatgctcaccagcgaggaagaaatcaaaaccactaaccctgtggctacagaggaatacggtatcgtggcagataacttgagttttagtcgtgcggttctttgtgatggaactgtcaacagccagggggccttacccggtatggtctggcagaaccgggacgtgtacctgcagggtcccatctgggccaagattcctcacacggacggcaacttccacccgtctccgctgatgggcggctttggcctgaaacatcctccgcctcagatcctgatcaagaacacgcctgtacctgcggatcctccgaccaccttcaaccagtcaaagctgaactctttcatcacgcaatacagcaccggacaggtcagcgtggaaattgaatgggagctgcagaaggaaaacagcaagcgctggaaccccgagatccagtacacctccaactactacaaatctacaagtgtggactttgctgttaatacagaaggcgtgtactctgaaccccgccccattggcacccgttacctcacccgtaatctg

SEQ ID NO: 131 - protein, 738 aa, Artificial Sequence
  source: /note="Description of Artificial Sequence: Synthetic polypeptide"
MAADGYLPDWLEDNLSEGIREWWALKPGAPKPKANQQKQDDGRGLVLPGYKYLGPFNGLDKGEPVNAADAAALEHDKAYDQQLQAGDNPYLRYNHADAEFQERLQEDTSFGGNLGRAVFQAKKRVLEPLGLVEEGAKTAPGKKRPVEPSPQRSPDSSTGIGKKGQQPARKRLNFGQTGDSESVPDPQPLGEPPAAPSGVGPNTMAAGGGAPMADNNEGADGVGSSSGNWHCDSTWLGDRVITTSTRTWALPTYNNHLYKQISNGTSGGATNDNTYFGYSTPWGYFDFNRFHCHFSPRDWQRLINNNWGFRPKRLSFKLFNIQVKEVTQNEGTKTIANNLTSTIQVFTDSEYQLPYVLGSAHQGCLPPFPADVFMIPQYGYLTLNNGSQAVGRSSFYCLEYFPSQMLRTGNNFQFTYTFEDVPFHSSYAHSQSLDRLMNPLIDQYLYYLSRTQTTGGTANTQTLGFSQGGPNTMANQAKNWLPGPCYRQQRVSTTTGQNNNSNFAWTAGTKYHLNGRNSLANPGIAMATHKDDEERFFPSNGILIFGKQNAARDNADYSDVMLTSEEEIKTTNPVATEEYGIVADNLSFSRAVLCDGTVNSQGALPGMVWQNRDVYLQGPIWAKIPHTDGNFHPSPLMGGFGLKHPPPQILIKNTPVPADPPTTFNQSKLNSFITQYSTGQVSVEIEWELQKENSKRWNPEIQYTSNYYKSTSVDFAVNTEGVYSEPRPIGTRYLTRNL

SEQ ID NO: 132 - DNA, 4385 bp, Adeno-associated virus 9
cagagagggagtggccaactccatcactaggggtaatcgcgaagcgcctcccacgctgccgcgtcagcgctgacgtagattacgtcataggggagtggtcctgtattagctgtcacgtgagtgcttttgcgacattttgcgacaccacatggccatttgaggtatatatggccgagtgagcgagcaggatctccattttgaccgcgaaatttgaacgagcagcagccatgccgggcttctacgagattgtgatcaaggtgccgagcgacctggacgagcacctgccgggcatttctgactcttttgtgaactgggtggccgagaaggaatgggagctgcccccggattctgacatggatcggaatctgatcgagcaggcacccctgaccgtggccgagaagctgcagcgcgacttcctggtccaatggcgccgcgtgagtaaggccccggaggccctcttctttgttcagttcgagaagggcgagagctactttcacctgcacgttctggtcgagaccacgggggtcaagtccatggtgctaggccgcttcctgagtcagattcgggagaagctggtccagaccatctaccgcgggatcgagccgaccctgcccaactggttcgcggtgaccaagacgcgtaatggcgccggcggggggaacaaggtggtggacgagtgctacatccccaactacctcctgcccaagactcagcccgagctgcagtgggcgtggactaacatggaggagtatataagcgcgtgcttgaacctggccgagcgcaaacggctcgtggcgcagcacctgacccacgtcagccagacgcaggagcagaacaaggagaatctgaaccccaattctgacgcgcccgtgatcaggtcaaaaacctccgcgcgctacatggagctggtcgggtggctggtggaccggggcatcacctccgagaagcagtggatccaggaggaccaggcctcgtacatctccttcaacgccgcctccaactcgcggtcccagatcaaggccgcgctggacaatgccggcaagatcatggcgctgaccaaatccgcgcccgactacctggtaggcccttcacttccggtggacattacgcagaaccgcatctaccgcatcctgcagctcaacggctacgaccctgcctacgccggctccgtctttctcggctgggcacaaaagaagttcgggaaacgcaacaccatctggctgtttgggccggccaccacgggaaagaccaacatcgcagaagccattgcccacgccgtgcccttctacggctgcgtcaactggaccaatgagaactttcccttcaacgattgcgtcgacaagatggtgatctggtgggaggagggcaagatgacggccaaggtcgtggagtccgccaaggccattctcggcggcagcaaggtgcgcgtggaccaaaagtgcaagtcgtccgcccagatcgaccccactcccgtgatcgtcacctccaacaccaacatgtgcgccgtgattgacgggaacagcaccaccttcgagcaccagcagcctctccaggaccggatgtttaagttcgaactcacccgccgtctggagcacgactttggcaaggtgacaaagcaggaagtcaaagagttcttccgctgggccagtgatcacgtgaccgaggtggcgcatgagttttacgtcagaaagggcggagccagcaaaagacccgcccccgatgacgcggataaaagcgagcccaagcgggcctgcccctcagtcgcggatccatcgacgtcagacgcggaaggagctccggtggactttgccgacaggtaccaaaacaaatgttctcgtcacgcgggcatgcttcagatgctgcttccctgcaaaacgtgcgagagaatgaatcagaatttcaacatttgcttcacacacggggtcagagactgctcagagtgtttccccggcgtgtcagaatctcaaccggtcgtcagaaagaggacgtatcggaaactctgtgcgattcatcatctgctggggcgggctcccgagattgcttgctcggcctgcgatctggtcaacgtggacctggatgactgtgtttctgagcaataaatgacttaaaccaggtatggctgccgatggttatcttccagattggctcgaggacaacctctctgagggcattcgcgagtggtgggcgctgaaacctggagccccgaagcccaaagccaaccagcaaaagcaggacgacggccggggtctggtgcttcctggctacaagtacctcggacccttcaacggactcgacaagggggagcccgtcaacgcggcggacgcagcggccctcgagcacggcaaggcctacgaccagcagctgcaggcgggtgacaatccgtacctgcggtataaccacgccgacgccgagtttcaggagcgtctgcaagaagatacgtcttttgggggcaacctcgggcgagcagtcttccaggccaagaagcgggttctcgaacctctcggtctggttgaggaaggcgctaagacggctcctggaaagaagagaccggtagagccatcaccccagcgttctccagactcctctacgggcatcggcaagaaaggccaacagcccgccagaaaaagactcaattttggtcagactggcgactcagagtcagttccagaccctcaacctctcggagaacctccagcagcgccctctggtgtgggacctaatacaatggctgcaggcggtggcgcaccaatggcagacaataacgaaggcgccgacggagtgggtaattcctcgggaaattggcattgcgattccacatggctgggggacagagtcatcaccaccagcacccgaacctgggcattgcccacctacaacaaccacctctacaagcaaatctccaatggaacatcgggaggaagcaccaacgacaacacctactttggctacagcaccccctgggggtattttgacttcaacagattccactgccacttctcaccacgtgactggcagcgactcatcaacaacaactggggattccggccaaagagactcaacttcaagctgttcaacatccaggtcaaggaggttacgacgaacgaaggcaccaagaccatcgccaataaccttaccagcaccgtccaggtctttacggactcggagtaccagctaccgtacgtcctaggctctgcccaccaaggatgcctgccaccgtttcctgcagacgtcttcatggttcctcagtacggctacctgacgctcaacaatggaagtcaagcgttaggacgttcttctttctactgtctggaatacttcccttctcagatgctgagaaccggcaacaactttcagttcagctacactttcgaggacgtgcctttccacagcagctacgcacacagccagagtctagatcgactgatgaaccccctcatcgaccagtacctatactacctggtcagaacacagacaactggaactgggggaactcaaactttggcattcagccaagcaggccctagctcaatggccaatcaggctagaaactgggtacccgggccttgctaccgtcagcagcgcgtctccacaaccaccaaccaaaataacaacagcaactttgcgtggacgggagctgctaaattcaagctgaacgggagagactcgctaatgaatcctggcgtggctatggcatcgcacaaagacgacgaggaccgcttctttccatcaagtggcgttctcatatttggcaagcaaggagccgggaacgatggagtcgactacagccaggtgctgattacagatgaggaagaaattaaagccaccaaccctgtagccacagaggaatacggagcagtggccatcaacaaccaggccgctaacacgcaggcgcaaactggacttgtgcataaccagggagttattcctggtatggtctggcagaaccgggacgtgtacctgcagggccctatttgggctaaaatacctcacacagatggcaactttcacccgtctcctctgatgggtggatttggactgaaacacccacctccacagattctaattaaaaatacaccagtgccggcagatcctcctcttaccttcaatcaagccaagctgaactctttcatcacgcagtacagcacgggacaagtcagcgtggaaatcgagtgggagctgcagaaagaaaacagcaagcgctggaatccagagatccagtatacttcaaactactacaaatctacaaatgtggactttgctgtcaataccaaaggtgtttactctgagcctcgccccattggtactcgttacctcacccgtaatttgtaattgcctgttaatcaataaaccggttaattcgtttcagttgaactttggtctctgcg

SEQ ID NO: 133 - DNA, 4382 bp, Adeno-associated virus 9
cagagagggagtggccaactccatcactaggggtaatcgcgaagcgcctcccacgctgccgcgtcagcgctgacgtagattacgtcataggggagtggtcctgtattagctgtcacgtgagtgcttttgcgacattttgcgacaccacatggccatttgaggtatatatggccgagtgagcgagcaggatctccattttgaccgcgaaatttgaacgagcagcagccatgccgggcttctacgagattgtgatcaaggtgccgagcgacctggacgagcacctgccgggcatttctgactcttttgtgaactgggtggccgagaaggaatgggagctgcccccggattctgacatggatcggaatctgatcgagcaggcacccctgaccgtggccgagaagctgtagcgcgacttcctggtccaatggcgccgcgtgagtaaggccccggaggccctcttctttgttcagttcgagaagggcgagagctactttcacctgcacgttctggtcgagaccacgggggtcaagtccatggtgctaggccgcttcctgagtcagattcgggagaagctggtccagaccatctaccgcgggatcgagccgaccctgcccaactggttcgcggtgaccaagacgcgtaatggcgccggcggggggaacaaggtggtggacgagtgctacatccccaactacctcctgcccaagactcagcccgagctgcagtgggcgtggactaacatggaggagtatataagcgcgtgcttgaacctggccgagcgcaaacggctcgtggcgcagcacctgacccacgtcagccagacgcaggagcagaacaaggagaatctgaaccccaattctgacgcgcccgtgatcaggtcaaaaacctccgcgcgctacatggagctggtcgggtggctggtggaccggggcatcacctccgagaagcagtggatccaggaggaccaggcctcgtacatctccttcaacgccgcctccaactcgcggtcccagatcaaggccgcgctggacaatgccggcaagatcatggcgctgaccaaatccgcgcccgactacctggtaggcccttcacttccggtggacattacgcagaaccgcatctaccgcatcctgcagctcaacggctacgaccctgcctacgccggctccgtctttctcggctgggcacaaaagaagttcgggaaacgcaacaccatctggctgtttgggccggccaccacgggaaagaccaacatcgcagaagccattgcccacgccgtgcccttctacggctgcgtcaactggaccaatgagaactttcccttcaacgattgcgtcgacaagatggtgatctggtgggaggagggcaagatgacggccaaggtcgtggagtccgccaaggccattctcggcggcagcaaggtgcgcgtggaccaaaagtgcaagtcgtccgcccagatcgaccccactcccgtgatcgtcacctccaacaccaacatgtgcgccgtgattgacgggaacagcaccaccttcgagcaccagcagcctctccaggaccggatgtttaagttcgaactcacccgccgtctggagcacgactttggcaaggtgacaaagcaggaagtcaaagagttcttccgctgggccagtgatcacgtgaccgaggtggcgcatgagttttacgtcagaaagggcggagccagcaaaagacccgcccccgatgacgcggataaaagcgagcccaagcgggcctgcccctcagtcgcggatccatcgacgtcagacgcggaaggagctccggtggactttgccgacaggtaccaaaacaaatgttctcgtcacgcgggcatgcttcagatgctgcttccctgcaaaacgtgcgagagaatgaatcagaatttcaacatttgcttcacacacggggtcagagactgctcagagtgtttccccggcgtgtcagaatctcaaccggtcgtcagaaagaggacgtatcggaaactctgtgcgattcatcatctgctggggcgggctcccgagattgcttgctcggcctgcgatctggtcaacgtggacctggatgactgtgtttctgagcaataaatgacttaaaccaggtatggctgccgatggttatcttccagattggctcgaggacaacctctctgagggcattcgcgagtggtgggacctgaaacctggagccccgaaacccaaagccaaccagcaaaagcaggacgacggccggggtctggtgcttcctggctacaagtacctcggacccttcaacggactcgacaagggggagcccgtcaacgcggcggacgcagcggccctcgagcacgacaaggcctacgaccagcagctcaaagcgggtgacaatccgtacctgcggtataaccacgccgacgccgagtttcaggagcgtctgcaagaagatacgtcttttgggggcaacctcgggcgagcagtcttccaggccaagaagcgggttctcgaacctctcggtctggttgaggaaggcgctaagacggctcctggaaagaagagaccggtagagcagtcaccccaagaaccagactcatcctcgggcatcggcaaatcaggccagcagcccgctaaaaagagactcaattttggtcagactggcgactcagagtcagtccccgacccacaacctctcggagaacctccagaagccccctcaggtctgggacctaatacaatggcttcaggcggtggcgctccaatggcagacaataacgaaggcgccgacggagtgggtaattcctcgggaaattggcattgcgattccacatggctgggggacagagtcatcaccaccagcacccgaacctgggcattgcccacctacaacaaccacctctacaagcaaatctccaatggaacatcgggaggaagcaccaacgacaacacctactttggctacagcaccccctgggggtattttgacttcaacagattccactgccacttctcaccacgtgactggcagcgactcatcaacaacaactggggattccggccaaagagactcaacttcaagctgttcaacatccaggtcaaggaggttacgacgaacgaaggcaccaagaccatcgccaataaccttaccagcaccgtccaggtctttacggactcggagtaccagctaccgtacgtcctaggctctgcccaccaaggatgcctgccaccgtttcctgcagacgtcttcatggttcctcagtacggctacctgacgctcaacaatggaagtcaagcgttaggacgttcttctttctactgtctggaatacttcccttctcagatgctgagaaccggcaacaactttcagttcagctacactttcgaggacgtgcctttccacagcagctacgcacacagccagagtctagatcgactgatgaaccccctcatcgaccagtacctatactacctggtcagaacacagacaactggaactgggggaactcaaactttggcattcagccaagcaggccctagctcaatggccaatcaggctagaaactgggtacccgggccttgctaccgtcagcagcgcgtctccacaaccaccaaccaaaataacaacagcaactttgcgtggacgggagctgctaaattcaagctgaacgggagagactcgctaatgaatcctggcgtggctatggcatcgcacaaagacgacgaggaccgcttctttccatcaagtggcgttctcatatttggcaagcaaggagccgggaacgatggagtcgactacagccaggtgctgattacagatgaggaagaaattaaagccaccaaccctgtagccacagaggaatacggagcagtggccatcaacaaccaggccgctaacacgcaggcgcaaactggacttgtgcataaccagggagttattcctggtatggtctggcagaaccgggacgtgtacctgcagggccctatttgggctaaaatacctcacacagatggcaactttcacccgtctcctctgatgggtggatttggactgaaacacccacctccacagattctaattaaaaatacaccagtgccggcagatcctcctcttaccttcaatcaagccaagctgaactctttcatcacgcagtacagcacgggacaagtcagcgtggaaatcgagtgggagctgcagaaagaaaacagcaagcgctggaatccagagatccagtatacttcaaactactacaaatctacaaatgtggactttgctgtcaataccgaaggtgtttactctgagcctcgccccattggtactcgttacctcacccgtaatttgtaattgcctgttaatcaataaaccggttaattcgtttcagttgaactttggtctctgcg

SEQ ID NO: 134 - protein, 736 aa, Adeno-associated virus 9
MAADGYLPDWLEDNLSEGIREWWALKPGAPQPKANQQHQDNARGLVLPGYKYLGPGNGLDKGEPVNAADAAALEHDKAYDQQLKAGDNPYLKYNHADAEFQERLKEDTSFGGNLGRAVFQAKKRLLEPLGLVEEAAKTAPGKKRPVEQSPQEPDSSAGIGKSGAQPAKKRLNFGQTGDTESVPDPQPIGEPPAAPSGVGSLTMASGGGAPVADNNEGADGVGSSSGNWHCDSQWLGDRVITTSTRTWALPTYNNHLYKQISNSTSGGSSNDNAYFGYSTPWGYFDFNRFHCHFSPRDWQRLINNNWGFRPKRLNFKLFNIQVKEVTDNNGVKTIANNLTSTVQVFTDSDYQLPYVLGSAHEGCLPPFPADVFMIPQYGYLTLNDGSQAVGRSSFYCLEYFPSQMLRTGNNFQFSYEFENVPFHSSYAHSQSLDRLMNPLIDQYLYYLSKTINGSGQNQQTLKFSVAGPSNMAVQGRNYIPGPSYRQQRVSTTVTQNNNSEFAWPGASSWALNGRNSLMNPGPAMASHKEGEDRFFPLSGSLIFGKQGTGRDNVDADKVMITNEEEIKTTNPVATESYGQVATNHQSAQAQAQTGWVQNQGILPGMVWQDRDVYLQGPIWAKIPHTDGNFHPSPLMGGFGMKHPPPQILIKNTPVPADPPTAFNKDKLNSFITQYSTGQVSVEIEWELQKENSKRWNPEIQYTSNYYKSNNVEFAVNTEGVYSEPRPIGTRYLTRNL

SEQ ID NO: 135 - protein, 736 aa, Adeno-associated virus 9
MAADGYLPDWLEDNLSEGIREWWDLKPGAPKPKANQQKQDDGRGLVLPGYKYLGPFNGLDKGEPVNAADAAALEHDKAYDQQLKAGDNPYLRYNHADAEFQERLQEDTSFGGNLGRAVFQAKKRVLEPLGLVEEGAKTAPGKKRPVEQSPQEPDSSSGIGKSGQQPAKKRLNFGQTGDSESVPDPQPLGEPPEAPSGLGPNTMASGGGAPMADNNEGADGVGNSSGNWHCDSTWLGDRVITTSTRTWALPTYNNHLYKQISNGTSGGSTNDNTYFGYSTPWGYFDFNRFHCHFSPRDWQRLINNNWGFRPKRLNFKLFNIQVKEVTTNEGTKTIANNLTSTVQVFTDSEYQLPYVLGSAHQGCLPPFPADVFMVPQYGYLTLNNGSQALGRSSFYCLEYFPSQMLRTGNNFQFSYTFEDVPFHSSYAHSQSLDRLMNPLIDQYLYYLVRTQTTGTGGTQTLAFSQAGPSSMANQARNWVPGPCYRQQRVSTTTNQNNNSNFAWTGAAKFKLNGRDSLMNPGVAMASHKDDEDRFFPSSGVLIFGKQGAGNDGVDYSQVLITDEEEIKATNPVATEEYGAVAINNQAANTQAQTGLVHNQGVIPGMVWQNRDVYLQGPIWAKIPHTDGNFHPSPLMGGFGLKHPPPQILIKNTPVPADPPLTFNQAKLNSFITQYSTGQVSVEIEWELQKENSKRWNPEIQYTSNYYKSTNVDFAVNTEGVYSEPRPIGTRYLTRNL

SEQ ID NO: 136 - protein, 623 aa, Adeno-associated virus 9
MPGFYEIVIKVPSDLDEHLPGISDSFVNWVAEKEWELPPDSDMDRNLIEQAPLTVAEKLQRDFLVQWRRVSKAPEALFFVQFEKGESYFHLHVLVETTGVKSMVLGRFLSQIREKLVQTIYRGIEPTLPNWFAVTKTRNGAGGGNKVVDECYIPNYLLPKTQPELQWAWTNMEEYISACLNLAERKRLVAQHLTHVSQTQEQNKENLNPNSDAPVIRSKTSARYMELVGWLVDRGITSEKQWIQEDQASYISFNAASNSRSQIKAALDNAGKIMALTKSAPDYLVGPSLPVDITQNRIYRILQLNGYDPAYAGSVFLGWAQKKFGKRNTIWLFGPATTGKTNIAEAIAHAVPFYGCVNWTNENFPFNDCVDKMVIWWEEGKMTAKVVESAKAILGGSKVRVDQKCKSSAQIDPTPVIVTSNTNMCAVIDGNSTTFEHQQPLQDRMFKFELTRRLEHDFGKVTKQEVKEFFRWASDHVTEVAHEFYVRKGGASKRPAPDDADKSEPKRACPSVADPSTSDAEGAPVDFADRYQNKCSRHAGMLQMLLPCKTCERMNQNFNICFTHGVRDCSECFPGVSESQPVVRKRTYRKLCAIHHLLGRAPEIACSACDLVNVDLDDCVSEQ

SEQ ID NO: 137 - DNA, 2211 bp, Artificial Sequence
  source: /note="Description of Artificial Sequence: Synthetic polynucleotide"
atggctgccgatggttatcttccagattggctcgaggacaaccttagtgaaggaattcgcgagtggtgggctttgaaacctggagcccctcaacccaaggcaaatcaacaacatcaagacaacgctcgaggtcttgtgcttccgggttacaaataccttggacccggcaacggactcgacaagggggagccggtcaacgcagcagacgcggcggccctcgagcacgacaaggcctacgaccagcagctcaaggccggagacaacccgtacctcaagtacaaccacgccgacgccgagttccaggagcggctcaaagaagatacgtcttttgggggcaacctcgggcgagcagtcttccaggccaaaaagaggcttcttgaacctcttggtctggttgaggaagcggctaagacggctcctggaaagaagaggcctgtagagcagtctcctcaggaaccggactcctccgcgggtattggcaaatcgggtgcacagcccgctaaaaagagactcaatttcggtcagactggcgacacagagtcagtcccagaccctcaaccaatcggagaacctcccgcagccccctcaggtgtgggatctcttacaatggcttcaggtggtggcgcaccagtggcagacaataacgaaggtgccgatggagtgggtagttcctcgggaaattggcattgcgattcccaatggctgggggacagagtcatcaccaccagcacccgaacctgggccctgcccacctacaacaatcacctctacaagcaaatctccaacagcacatctggaggatcttcaaatgacaacgcctacttcggctacagcaccccctgggggtattttgacttcaacagattccactgccacttctcaccacgtgactggcagcgactcatcaacaacaactggggattccggcctaagcgactcaacttcaagctcttcaacattcaggtcaaagaggttacggacaacaatggagtcaagaccatcgccaataaccttaccagcacggtccaggtcttcacggactcagactatcagctcccgtacgtgctcgggtcggctcacgagggctgcctcccgccgttcccagcggacgttttcatgattcctcagtacgggtatctgacgcttaatgatggaagccaggccgtgggtcgttcgtccttttactgcctggaatatttcccgtcgcaaatgctaagaacgggtaacaacttccagttcagctacgagtttgagaacgtacctttccatagcagctacgctcacagccaaagcctggaccgactaatgaatccactcatcgaccaatacttgtactatctctcaaagactattaacggttctggacagaatcaacaaacgctaaaattcagtgtggccggacccagcaacatggctgtccagggaagaaactacatacctggacccagctaccgacaacaacgtgtctcaaccactgtgactcaaaacaacaacagcgaatttgcttggcctggagcttcttcttgggctctcaatggacgtaatagcttgatgaatcctggacctgctatggccagccacaaagaaggagaggaccgtttctttcctttgtctggatctttaatttttggcaaacaaggaactggaagagacaacgtggatgcggacaaagtcatgataaccaacgaagaagaaattaaaactactaacccggtagcaacggagtcctatggacaagtggccacaaaccaccagagtgcccaagcacaggcgcagaccggctgggttcaaaaccaaggaatacttccgggtatggtttggcaggacagagatgtgtacctgcaaggacccatttgggccaaaattcctcacacggacggcaactttcacccttctccgctgatgggagggtttggaatgaagcacccgcctcctcagatcctcatcaaaaacacacctgtacctgcggatcctccaacggccttcaacaaggacaagctgaactctttcatcacccagtattctactggccaagtcagcgtggagatcgagtgggagctgcagaaggaaaacagcaagcgctggaacccggagatccagtacacttccaactattacaagtctaataatgttgaatttgctgttaatactgaaggtgtatatagtgaaccccgccccattggcaccagatacctgactcgtaatctgtaa

SEQ ID NO: 138 - protein, 736 aa, Artificial Sequence; identical to SEQ ID NO: 134
  source: /note="Description of Artificial Sequence: Synthetic polypeptide"

SEQ ID NO: 139 - DNA, 2460 bp, Artificial Sequence
  source: /note="Description of Artificial Sequence: Synthetic polynucleotide"
ggtaattcctccggaaattggcattgcgattccacatggctgggcgaccgagtcattaccaccagcacccggacttgggccctgcccacctacaacaaccacctctacaagcaaatctccagccaatcgggtgccaccaacgacaaccactacttcggctacagcaccccttgggggtattttgatttcaacagattccactgccatttctcaccacgtgactggcagcgactcatcaacaacaactggggattcatggctgccgatggttatcttccagattggctcgaggacactctctctgaaggaatcagacagtggtggaagctcaaacctggcccaccaccgccgaaacctaaccaacaacaccgggacgacagtaggggtcttgtgcttcctgggtacaagtacctcggacccttcaacggactcgacaaaggagagccggtcaacgaggcagacgccgcggccctcgagcacgacaaagcctacgaccaccagctcaagcaaggggacaacccgtacctcaaatacaaccacgcggacgctgaatttcaggagcgtcttcaagaagatacgtctttcgggggcaacctcgggcgagcagtcttccaggccaaaaagagggtactcgagcctcttggtctggttgaggaagctgttaagacggctcctggaaaaaagagacctatagagcagtctcctgcagaaccggactcttcctcgggcatcggcaaatcaggccagcagcccgctaagaaaagactcaattttggtcagactggcgacacagagtcagtcccagaccctcaaccaatcggagaaccccccgcagccccctctggtgtgggatctaatacaatggcttcaggcggtggggcaccaatggcagacaataacgaaggcgccgacggagtgggtaattcctcgggaaattggcattgcgattccacatggatgggcgacagagttatcaccaccagcacaagaacctgggccctccccacctacaataatcacctctacaagcaaatctccagcgaatcgggagccaccaacgacaaccactacttcggctacagcaccccctgggggtattttgactttaacagattccactgtcacttctcaccacgtgactggcagcgactcatcaacaacaactggggatttagacccaagaaactcaatttcaagctcttcaacatccaagtcaaggaggtcacgcagaatgatggaaccacgaccatcgccaataaccttaccagcacggtgcaggtcttcacagactctgagtaccagctgccctacgtcctcggttcggctcaccagggctgccttccgccgttcccagcagacgtcttcatgattcctcagtacggctacttgactctgaacaatggcagccaagcggtaggacgttcttcattctactgtctagagtattttccctctcagatgctgaggacgggaaacaacttcaccttcagctacacttttgaagacgtgcctttccacagcagctacgcgcacagccagagtctggatcggctgatgaatcctctcattgaccagtacctgtattacctgagcaaaactcagggtacaagtggaacaacgcagcaatcgagactgcagttcagccaagctgggcctagctccatggctcagcaggccaaaaactggctaccgggacccagctaccgacagcagcgaatgtctaagacggctaatgacaacaacaacagtgaatttgcttggactgcagccaccaaatattacctgaatggaagaaattctctggtcaatcccgggcccccaatggccagtcacaaggacgatgaggaaaagtatttccccatgcacggaaatctcatctttggaaaacaaggcacaggaactaccaatgtggacattgaatcagtgcttattacagacgaagaagaaatcagaacaactaatcctgtggctacagaacaatacggacaggttgccaccaaccatcagagtcagaacaccacagcttcctatggaagtgtggacagccagggaatcttacctggaatggtgtggcaggaccgcgatgtctatcttcaaggtcccatttgggccaaaactcctcacacggacggacactttcatccttctccgctcatgggaggctttggactgaaacaccctcctccccagatcctgatcaaaaacacacctgtgccagcgaatcccgcgaccactttcactcctggaaagtttgcttcgttcattacccagtattccaccggacaggtcagcgtggaaatagagtgggagctgcagaaagaaaacagcaaacgctggaacccagaaattcagtacacctccaactacaacaagtcggtgaatgtggagtttaccgtggacgcaaacggtgtttattctgaaccccgccctattggcactcgttaccttacccggaacttg

SEQ ID NO: 140 - DNA, 3123 bp, Artificial Sequence
  source: /note="Description of Artificial Sequence: Synthetic polynucleotide"
gaattcgccctttctacggctgcgtcaactggaccaatgaaaactttcccttcaacgattgcgtcgacaagatggtgatctggtgggaggagggaaagatgaccgccaaggtcgtggaatctgccaaagccattctgggtggaggcaaggttcgtgtggaccagaaatgcaagtcttcggcccagatcgacccgactccggtgattgtcacctctaacaccaacatgtgcgccgtgattgacggaaactcgaccaccttcgagcaccagcagccgttgcaagaccggatgttcaaatttgaacttacccgccgtttggatcatgactttgggaaggtcaccaagcaggaagtcaaagactttttccggtgggctcaagatcacgtgactgaggtggagcatgagttctacgtcaaaaagggtggagccaagaaaaggcccgcccccgatgatgtatatataaatgagcccaagcgggcgcgcgagtcagttgcgcagccatcgacgtcagacgcggaagcttcgataaactacgcggacaggtaccaaaacaaatgttctcgtcacgtgggcatgaatctgatgctgtttccctgtcgacaatgcgaaagaatgaatcagaattcaaatatctgcttcacacacgggcaaaaagactgtttggaatgctttcccgtgtcagaatctcaacccgtttctgtcgtcagaaaaacgtatcagaaactttgttacattcatcatatcatgggaaaagtaccagacgcctgcactgcctgcgacctggtaaatgtggacttggatgactgtatttctgagcaataaatgacttaaatcaggtatggctgctgacggttatcttccagattggctcgaggacactctctctgaaggaatcagacagtggtggaagctcaaacctggcccaccaccgccgaaacctaaccaacaacaccgggacgacagtaggggtcttgtgcttcctgggtacaagtacctcggacccttcaacggactcgacaaaggagagccggtcaacgaggcagacgccgcggccctcgagcacgacaaagcctacgaccaccagctcaagcaaggggacaacccgtacctcaaatacaaccacgcggacgctgaatttcaggagcgtcttcaagaagatacgtctttcgggggcaacctcgggcgagcagtcttccaggccaaaaagagggtactcgagcctcttggtctggttgaggaagctgttaagacggctcctggaaaaaagagacctatagagcagtctcctgcagaaccggactcttcctcgggcatcggcaaatcaggccagcagcccgctaagaaaagactcaattttggtcagactggcgacacagagtcagtcccaggccctcaaccaatcggagaaccccccgcagccccctctggtgtgggatctaatacaatggcttcaggcggtggggcaccaatggcagacaataacgaaggcgccgacggagtgggtaattcctcgggaaattggcattgcgattccacatggatgggcgacagagttatcaccaccagcacaagaacctgggccctccccacctacaataatcacctctacaagcaaatctccagcgaatcgggagccaccaacgacaaccactacttcggctacagcaccccctgggggtattttgactttaacagattccactgtcacttctcaccacgtgactggcagcgactcatcaacaacaactggggatttagacccaagaaactcaatttcaagctcttcaacatccaagtcaaggaggtcacgcagaatgatggaaccacgaccatcgccaataaccttaccagcgcggtgcaggtcttcacagactctgagtaccagctgccctacgtcctcggttcggctcaccagggctgccttccgccgttcccagcagacgtcttcatgattcctcagtacggctacttgactctgaacaatggcagccaagcggtaggacgttcttcattctactgtctagagtattttccctctcagatgctgaggacgggaaacaacttcaccttcagctacacttttgaagacgtgcctttccacagcagctacgcgcacagccagagtctggatcggctgatgaatcctctcattgaccagtacctgtattacctgagcaaaactcagggtacaagtggaacaacgcagcaatcgagactgcagttcagccaagctgggcctagctccatggctcagcaggccaaaaactggctaccgggacccagctaccgacagcagcgaatgtctaagacggctaatgacaacaacaacagtgaatttgcttggactgcagccaccaaatattacctgaatggaagaaattctctggtcaatcccgggcccccagtggccagtcacaaggacgatgaggaaaagtatttccccatgcacggaaatctcatctttggaaaacaaggcacaggaactaccaatgtggacattgaatcagtgcttattacagacgaagaagaaatcagaacaactaatcctgtggctacagaacaatacggacaggttgccaccaaccatcagagtcagaacaccacagcttcctatggaagtgtggacagccagggaatcttacctggaatggtgtggcaggaccgcgatgtctatcttcaaggtcccatttgggccaaaactcctcacacggacggacactttcatccttctccgctcatgggaggctttggactgaaacaccctcctccccagatcctgatcaaaaacacacctgtgccagcgaatcccgcgaccactttcactcctggaaagtttgcttcgttcattacccagtattccacctgacaggtcagcgtggaaatagagtgggagctgcagaaagaaaacagcaaacgctggaacccagaaattcagtacacctccaactacaacaagtcggtgaatgtggagtttaccgtggacgcaaacggtgtttattctgaaccccgccctattggcactcgttaccttacccggaacttgtaatttcctgttaatgaataagccgatttatgcgtttcagttgaactttggtctctgcgaagggcgaattcgtttaaacct

SEQ ID NO: 141 - protein, 735 aa, Artificial Sequence
  source: /note="Description of Artificial Sequence: Synthetic polypeptide"
MAADGYLPDWLEDTLSEGIRQWWKLKPGPPPPKPNQQHRDDSRGLVLPGYKYLGPFNGLDKGEPVNEADAAALEHDKAYDHQLKQGDNPYLKYNHADAEFQERLQEDTSFGGNLGRAVFQAKKRVLEPLGLVEEAVKTAPGKKRPIEQSPAEPDSSSGIGKSGQQPAKKRLNFGQTGDTESVPGPQPIGEPPAAPSGVGSNTMASGGGAPMADNNEGADGVGNSSGNWHCDSTWMGDRVITTSTRTWALPTYNNHLYKQISSESGATNDNHYFGYSTPWGYFDFNRFHCHFSPRDWQRLINNNWGFRPKKLNFKLFNIQVKEVTQNDGTTTIANNLTSAVQVFTDSEYQLPYVLGSAHQGCLPPFPADVFMIPQYGYLTLNNGSQAVGRSSFYCLEYFPSQMLRTGNNFTFSYTFEDVPFHSSYAHSQSLDRLMNPLIDQYLYYLSKTQGTSGTTQQSRLQFSQAGPSSMAQQAKNWLPGPSYRQQRMSKTANDNNNSEFAWTAATKYYLNGRNSLVNPGPPVASHKDDEEKYFPMHGNLIFGKQGTGTTNVDIESVLITDEEEIRTTNPVATEQYGQVATNHQSQNTTASYGSVDSQGILPGMVWQDRDVYLQGPIWAKTPHTDGHFHPSPLMGGFGLKHPPPQILIKNTPVPANPATTFTPGKFASFITQYSTGQVSVEIEWELQKENSKRWNPEIQYTSNYNKSVNVEFTVDANGVYSEPRPIGTRYLTRNL

SEQ ID NO: 142 - DNA, 3123 bp, Artificial Sequence
  source: /note="Description of Artificial Sequence: Synthetic polynucleotide"
gaattcgccctttctacggctgcgtcaactggaccaatgaaaactttcccttcaacgattgcgtcgacaagatggtgatctggtgggaggagggaaagatgaccgccaaggtcgtggaatctgccaaagccattctgggtggaagcaaggttcgtgtggaccagaaatgcaagtcttcggcccagatcgacccgactccggtgattgtcacctctaacaccaacatgtgcgccgtgattgacggaaactcgaccaccttcgagcaccagcagccgttgcaagaccggatgttcaaatttgaacttacccgccgtttggatcatgactttgggaaggtcaccaagcaggaagtcaaagactttttccggtgggctcaagatcacgtgactgaggtggagcatgagttctacgtcaaaaagggtggagccaagaaaaggcccgcccccgatgatgtatatataaatgagcccaagcgggcgcgcgagtcagttgcgcagccatcgacgtcagacgcggaagcttcgataaactacgcgggcaggtaccaaaacaaatgttctcgtcacgtgggcatgaatctgatgctgtttccctgtcgacaatgcgaaagaatgaatcagaattcaaatatctgcttcacacacgggcaaaaagactgtttggaatgctttcccgtgtcagaatctcaacccgtttctgtcgtcagaaaaacgtatcagaaactttgttacattcatcatatcatgggaaaagaaccagacgcctgcactgcctgcgacctggtaaatgtggacttggatgactgtatttctgagcaataaatgacttaaatcaggtatggctgctgacggttatcttccagattggctcgaggacactctctctgaaggaatcagacagtggtggaagctcaaacctggcccaccaccgccgaaacctaaccaacaacaccgggacgacagtaggggtcttgtgcttcctgggtacaagtacctcggacccttcaacggactcgacaaaggagagccggtcaacgaggcagacgccgcggccctcgagcacgacaaagcctacgaccaccagctcaagcaaggggacaacccgtacctcaaatacaaccacgcggacgctgaatttcaggagcgtcttcaagaagatacgtctttcgggggcaacctcgggcgagcagtcttccaggccaaaaagagggtactcgagcctcttggtctggttgaggaagctgttaagacggctcctggaaaaaagagacctatagagcagtctcctgcagaaccggactcttcctcgggcatcggcgaatcaggccagcagcccgctaagaaaagactcaattttggtcagactggcgacacagagtcagtcccagaccctcaaccaatcggagaaccccccgcagccccctctggtgtgggatctaatacaatggcttcaggcggtggggcaccaatggcagacgataacgaaggcgccgacggagtgggtaattcctcgggaaattggcattgcgattccacatggatgggcgacagagttatcaccaccagcacaagaacctgggccctccccacctacaataatcacctctacaagcaaatctccagcgaatcgggagccaccaacgacaaccactacttcggctacagcaccccctgggggtattttgactttaacagattccactgtcacttctcaccacgtgactggcagcgactcatcaacaacaactggggatttagacccaagaaactcaatttcaagctcttcaacatccaagtcaaggaggtcacgcagaatgatggaaccacgaccatcgccaataaccttaccagcacggtgcaggtcttcacagactctgagtaccagctgccctacgtcctcggttcggctcaccagggctgccttccgccgttcccagcagacgtcttcatgattcctcagtacggctacttgactctgaacaatggcagccaagcggtaggacgttcttcattctactgtctagagtattttccctctcagatgctgaggacgggaaacaacttcaccttcagctacacttttgaagacgtgcctttccacagcagctacgcgcacagccagagtctggatcggctgatgaatcctctcattgaccagtacctgtattacctgagcaaaactcagggtacaagtggaacaacgcagcaatcgagactgcagttcagccaagctgggcctagctccatggctcagcaggccaaaaactggctaccgggacccagctaccgacagcagcgaatgtctaagacggctaatgacaacaacaacagtgaatttgcttggactgcagccaccaaatattacctgaatggaagaaattctctggtcaatcccgggcccccaatggccagtcacaaggacgatgaggaaaagtatttccccatgcacggaaatctcatctttggaaaacaaggcacaggaactaccaatgtggacattgaatcagtgcttattacagacgaagaagaaatcagaacaactaatcctgtggctacagaacaatacggacaggttgccaccaaccatcagagtcaggacaccacagcttcctatggaagtgtggacagccagggaatcttacctggaatggtgtggcaggaccgcgatgtctatcttcaaggtcccatttgggccaaaactcctcacacggacggacactttcatccttctccgctcatgggaggctttggactgaaacaccctcctccccagatcctgatcaaaaacacacctgtgccagcgaatcccgcgaccactttcactcctggaaagtttgcttcgttcattacccagtattccaccggacaggtcagcgtggaaatagagtgggagctgcagaaagaaaacagcaaacgctggaacccagaaattcagtacacctccaactacaacaagtcggtgaatgtggagtttaccgtggacgcaaacggtgtttattctgaaccccgccctattggcactcgttaccttacccggaacttgtaatttcctgttaatgaataaaccgatttatgcgtttcagttgaactttggtctctgcgaagggcgaattcgcggccgcta

SEQ ID NO: 143 - protein, 735 aa, Artificial Sequence
  source: /note="Description of Artificial Sequence: Synthetic polypeptide"
MAADGYLPDWLEDTLSEGIRQWWKLKPGPPPPKPNQQHRDDSRGLVLPGYKYLGPFNGLDKGEPVNEADAAALEHDKAYDHQLKQGDNPYLKYNHADAEFQERLQEDTSFGGNLGRAVFQAKKRVLEPLGLVEEAVKTAPGKKRPIEQSPAEPDSSSGIGESGQQPAKKRLNFGQTGDTESVPDPQPIGEPPAAPSGVGSNTMASGGGAPMADDNEGADGVGNSSGNWHCDSTWMGDRVITTSTRTWALPTYNNHLYKQISSESGATNDNHYFGYSTPWGYFDFNRFHCHFSPRDWQRLINNNWGFRPKKLNFKLFNIQVKEVTQNDGTTTIANNLTSTVQVFTDSEYQLPYVLGSAHQGCLPPFPADVFMIPQYGYLTLNNGSQAVGRSSFYCLEYFPSQMLRTGNNFTFSYTFEDVPFHSSYAHSQSLDRLMNPLIDQYLYYLSKTQGTSGTTQQSRLQFSQAGPSSMAQQAKNWLPGPSYRQQRMSKTANDNNNSEFAWTAATKYYLNGRNSLVNPGPPMASHKDDEEKYFPMHGNLIFGKQGTGTTNVDIESVLITDEEEIRTTNPVATEQYGQVATNHQSQDTTASYGSVDSQGILPGMVWQDRDVYLQGPIWAKTPHTDGHFHPSPLMGGFGLKHPPPQILIKNTPVPANPATTFTPGKFASFITQYSTGQVSVEIEWELQKENSKRWNPEIQYTSNYNKSVNVEFTVDANGVYSEPRPIGTRYLTRNL

SEQ ID NO: 144 - DNA, 3113 bp, Artificial Sequence
  source: /note="Description of Artificial Sequence: Synthetic polynucleotide"
gaattcgccctttctacggctgcgtcaactggaccaatgaaaactttcccttcaacgattgcgtcgacaagatggtgatctggtgggaggagggaaagatgaccgccaaggtcgtggaatctgccaaagccattctgggtggaagcaaggttcgtgtggaccagaaatgcaagtcttcggcccagatcgacccgactccggtgattgtcacctctaacaccaacatgtgcgccgtgattgacggaaactcgaccaccttcgagcaccagcagccgttgcaagaccggatgttcaaatttgaacttacccgccgtttggatcatgactttgggaaggtcaccaagcaggaagtcaaagactttttccggtgggctcaagatcacgtgactgaggtggagcatgagttctacgtcaaaaagggtggagccaagaaaaggcccgcccccgatgatgtatatataaatgagcccaagcgggcgcgcgagtcagttgcgcagccatcgacgtcagacgcggaagcttcgataaactacgcggacaggtaccaaaacaaatgttctcgtcacgtgggcatgaatctgatgctgtttccctgtcgacaatgcgaaagaatgaatcagaattcaaatatctgcttcacacacgggcaaaaagactgtttggaatgctttcccgtgtcagaatctcaacccgttcctgtcgtcagaaaaacgtatcagaaactttgttacattcatcatatcatgggaaaagtaccagacgcctgcactgcctgcgacctggtaaatgtggacttggatgactgtatttctgagcaataaatgacttaaatcaggtatggctgctgacggttatcttccagattggctcgaggacactctctctgaaggaatcagacagtggtggaagctcaaacctggcccaccaccgccgaaacctaaccaacaacaccgggacgacagtaggggtcttgtgcttcctgggtacaagtacctcggacccttcaacggactcgacaaaggagagccggtcaacgaggcagacgccgcggccctcgagcacgacaaagcctacgaccaccagctcaagcaaggggacaacccgtacctcaaatacaaccacgcggacgctgaatttcaggagcgtcttcaagaagatacgtctttcgggggcaacctcgggcgagcagtcttccaggccaaaaagagggtactcgagcctcttggtctggttgaggaagctgttaagacggctcctggaaaaaagagacctatagagcagtctcctgcagaaccggactcttcctcgggcatcggcaaatcaggccagcagcccgctaagaaaagactcaattttggtcagactggcgacacagagtcagtcccagaccctcaaccaatcggagaaccccccgcagccccctctggtgtgggatctaatacaatggcttcaggcggtggggcaccaatggcagacaataacgaaggcgccgacggagtgggtaattcctcgggaaattggcattgcgattccacatggatgggcgacagagttatcaccaccagcacaagaacctgggccctccccacctacaataatcacctctacaagcaaatctccagcgaatcgggagccaccaacgacaaccactacttcggctacagcaccccctgggggtattttgactttaacagattccactgtcacttctcaccacgtgactggcagcgactcatcaataacaactggggatttagacccaagaaactcaatttcaagctcttcaacatccaagtcaaggaggtcacgcagaatgatggaaccacgaccatcgccaataaccttaccagcacggtgcaggtcttcacagactctgagtaccagctgccctacgtcctcggttcggctcaccagggctgccttccgccgttcccagcagacgtcttcatgattcctcagtacggctacttgactctgaacaatggcagccaagcggtaggacgttcttcattctactgtctagagtattttccctctcagatgctgaggacgggaaacaacttcaccttcagctacacttttgaagacgtgcctttccacagcagctacgcgcacagccagagtctggatcggctgatgaatcctctcattgaccagtacctgtattacctgagcaaaactcagggtacaagtggaacaacgcagcaatcgagactgcagttcaaccaagctgggcctagctccatggctcagcaggccaaaaactggctaccgggacccagctaccgacagcagcgaatgtctaagacggctaatgacaacaacaacagtgaatttgcttggactgcagccaccaaatattacccgaatggaagaaattctctggtcaatcccgggcccccaatggccagtcacaaggacgatgaggaaaagtatttccccatgcacggaaatctcatctttggaaaacaaggcacaggaactaccaatgtggacattgaatcagtgcttattacagacgaagaagaaatcagaacgactaatcctgtggctacagaacaatacggacaggttgccaccaaccgtcagagtcagaacaccacagcttcctatggaagtgtggacagccagggaatcttacctggaatggtgtggcaggaccgcgatgtctatcttcaaggtcccatttgggccaaaactcctcacacggacggacactttcatccttctccgctcatgggaggctttggactgaaacaccctcctccccagatcctgatcaaaaacacacctgtgccagcgaatcccgcgaccactttcactcctggaaagtttgcttcgttcattacccagtattccaccggacaggtcagcgtggaaatagagtgggagctgcagaaagaaaacagcaaacgctggaacccggaaattcagtacacctccaactacaacaagtcggtgaatgtggagtttaccgtggacgcaaacggtgtttattctgaaccccgccctattggcactcgttaccttacccggaacttgtaatttcctgttaatgaataaaccgatttatgcgtttcagttgaactttggtctctgcgaagggcgaattc

SEQ ID NO: 145 - protein, 735 aa, Artificial Sequence
  source: /note="Description of Artificial Sequence: Synthetic polypeptide"
MAADGYLPDWLEDTLSEGIRQWWKLKPGPPPPKPNQQHRDDSRGLVLPGYKYLGPFNGLDKGEPVNEADAAALEHDKAYDHQLKQGDNPYLKYNHADAEFQERLQEDTSFGGNLGRAVFQAKKRVLEPLGLVEEAVKTAPGKKRPIEQSPAEPDSSSGIGKSGQQPAKKRLNFGQTGDTESVPDPQPIGEPPAAPSGVGSNTMASGGGAPMADNNEGADGVGNSSGNWHCDSTWMGDRVITTSTRTWALPTYNNHLYKQISSESGATNDNHYFGYSTPWGYFDFNRFHCHFSPRDWQRLINNNWGFRPKKLNFKLFNIQVKEVTQNDGTTTIANNLTSTVQVFTDSEYQLPYVLGSAHQGCLPPFPADVFMIPQYGYLTLNNGSQAVGRSSFYCLEYFPSQMLRTGNNFTFSYTFEDVPFHSSYAHSQSLDRLMNPLIDQYLYYLSKTQGTSGTTQQSRLQFNQAGPSSMAQQAKNWLPGPSYRQQRMSKTANDNNNSEFAWTAATKYYPNGRNSLVNPGPPMASHKDDEEKYFPMHGNLIFGKQGTGTTNVDIESVLITDEEEIRTTNPVATEQYGQVATNRQSQNTTASYGSVDSQGILPGMVWQDRDVYLQGPIWAKTPHTDGHFHPSPLMGGFGLKHPPPQILIKNTPVPANPATTFTPGKFASFITQYSTGQVSVEIEWELQKENSKRWNPEIQYTSNYNKSVNVEFTVDANGVYSEPRPIGTRYLTRNL

SEQ ID NO: 146 - DNA, 3122 bp, Artificial Sequence
  source: /note="Description of Artificial Sequence: Synthetic polynucleotide"
agcggccgcgaattcgccctttctacggctgcgtcaactggaccaatgaaaactttcccttcaacgattgcgtcgacaagatggtgatctggtgggaggagggaaagatgaccgccaaggtcgtggaatctgccaaagccattctgggtggaagcaaggttcgtgtggaccagaaatgcaggtcttcggcccagatcgacccgactccggtgattgtcacctctaacaccaacatgtgcgccgtgattgacggaaactcgaccaccttcgagcaccagcagccgttgcaagaccggatgttcaaatttgaacttacccgccgtttggatcatgactttgggaaggtcaccaagcaggaagtcaaagactttttccggtgggctcaagatcacgtgactgaggtggagcatgagttctacgtcaaaaagggtggagccaagaaaaggcccgcccccgatgatgtatatataaatgagcccaagcgggcgcgcgagtcagttgcgcagccatcgacgtcagacgcggaagcttcgataaactacgcggacaggtaccaaaacaaatgttctcgtcacgtgggcatgaatctgatgctgtttccctgtcgacaatgcgaaagaatgaatcagaattcaaatatctgcttcacacacgggcaaaaagactgtttggaatgctttcccgtgtcagaatctcaacccgtttctgtcgtcagaaaaacgtatcagaaactttgttacattcatcatatcatgggaaaagtaccagacgcctgcactgcctgcgacctggtaaatgtggacttggatgactgtatttctgagcaataaatgacttaaatcaggtatggctgctgacggttatcttccagattggctcgaggacactctctctgaaggaatcagacagtggtggaagctcaaacctggcccaccaccgccgaaacctaaccaacaacaccgggacgacagtaggggtcttgtgcttcctgggtacaagtacctcggacccttcaacggactcgacaaaggagagccggtcaacgaggcagacgccgcggccctcgagcacgacaaagcctacgaccaccagctcaagcaaggggacaacccgtacctcaaatacaaccacgcggacgctgaatttcaggagcgtcttcaagaagatacgtctttcgggggcaacctcgggcgagcagtcttccaggccaaaaagagggtactcgagcctcttggtctggttgaggaagctgttaagacggctcctggaaaaaagagacctatagagcagtctcctgcagaaccggactcttcctcgggcatcggcaaatcaggccagcagcccgctaagaaaagactcaattttggtcagactggcgacacagagtcagtcccagaccctcaaccaatcggagaaccccccgcagccccctctggtgtgggatctaatacaatggcttcaggcggtggggcaccaatggcagacaataacgaaggcgccgacggagtgggtaattcctcgggaaattggcattgcgattccacatggatgggcgacagagttatcaccaccagcacaagaacctgggccctccccacctacaataatcgcctctacaagcaaatctccagcgaatcgggagccaccaacgacaaccactacttcggctacagcaccccctgggggtattttgactttaacagattccactgtcacttctcaccacgtgactggcagcgactcatcaacaacaactggggatttagacccaagaaactcaatttcaagctcttcaacatccaagtcaaggaggtcacgcagaatgatggaaccacgaccatcgccaataaccttaccagcacggtgcaggtcttcacagactctgagtaccagctgccctacgtcctcggttcggctcaccagggctgccttccgccgttcccagcagacgtcttcatgattcctcagtacggctacttgactctgaacaatggcagccaagcggtaggacgttcttcattctactgtctagagtattttccctctcagatgctgaggacgggaaacaacttcaccttcagctacacttttgaagacgtgcctttccacagcagctacgcgcacagccagagtctggatcggctgatgaatcctctcattgaccagtacctgtattacctgagcaaaactcagggtacaagtggaacaacgcagcaatcgagactgcagttcagccaagctgggcctagctccatggctcagcaggccaaaaactggctaccgggacccagctaccgacagcagcgaatgtctaagacggctaatgacaacaacaacagtgaatttgcttggactgcagccaccaaatattacctgaatggaagaaattctctggtcaatcccgggcccccaatggccagtcacaaggacgatgaggaaaagtatttccccatgcacggaaatctcatctttggaaaacaaggcacaggaactaccaatgtggacattgaatcagtgcttattacagacgaagaagaaatcagaacaactaatcctgtggctacagaacaatacggacaggttgccaccaaccatcagagtcagaacaccacagcttcctatggaagtgtggacagccagggaatcttacctggaatggtgtggcaggaccgcgatgtctatcttcaaggtcccatttgggccaaaactcctcacacggacggacactttcatccttctccgctcatgggaggctttggactgaaacaccctcctccccagatcctgatcaaaaacacacctgtgccagcgaatcccgcgaccactttcactcctggaaagtttgcttcgttcattacccagtattccaccggacaggtcagcgtggaaatagagtgggagctgcagaaagaaaacagcaaacgctggaacccagaaattcagtacacctccaactacaacaagtcggtgaatgtggagtttaccgtggacgcaaacggtgtttattctgaaccccgccctattggcactcgttaccttacccggaacttgtaatttcctgttaatgaataaaccgatttatgcgtttcagttgaactttggtctctgcgaagggcgaattc

SEQ ID NO: 147 - protein, 735 aa, Artificial Sequence
  source: /note="Description of Artificial Sequence: Synthetic polypeptide"
MAADGYLPDWLEDTLSEGIRQWWKLKPGPPPPKPNQQHRDDSRGLVLPGYKYLGPFNGLDKGEPVNEADAAALEHDKAYDHQLKQGDNPYLKYNHADAEFQERLQEDTSFGGNLGRAVFQAKKRVLEPLGLVEEAVKTAPGKKRPIEQSPAEPDSSSGIGKSGQQPAKKRLNFGQTGDTESVPDPQPIGEPPAAPSGVGSNTMASGGGAPMADNNEGADGVGNSSGNWHCDSTWMGDRVITTSTRTWALPTYNNRLYKQISSESGATNDNHYFGYSTPWGYFDFNRFHCHFSPRDWQRLINNNWGFRPKKLNFKLFNIQVKEVTQNDGTTTIANNLTSTVQVFTDSEYQLPYVLGSAHQGCLPPFPADVFMIPQYGYLTLNNGSQAVGRSSFYCLEYFPSQMLRTGNNFTFSYTFEDVPFHSSYAHSQSLDRLMNPLIDQYLYYLSKTQGTSGTTQQSRLQFSQAGPSSMAQQAKNWLPGPSYRQQRMSKTANDNNNSEFAWTAATKYYLNGRNSLVNPGPPMASHKDDEEKYFPMHGNLIFGKQGTGTTNVDIESVLITDEEEIRTTNPVATEQYGQVATNHQSQNTTASYGSVDSQGILPGMVWQDRDVYLQGPIWAKTPHTDGHFHPSPLMGGFGLKHPPPQILIKNTPVPANPATTFTPGKFASFITQYSTGQVSVEIEWELQKENSKRWNPEIQYTSNYNKSVNVEFTVDANGVYSEPRPIGTRYLTRNL

SEQ ID NO: 148 - DNA, 3121 bp, Artificial Sequence
  source: /note="Description of Artificial Sequence: Synthetic polynucleotide"
gaattcgcccttcgcagagaccaaagttcaactgaaacgaatcaaccggtttattgattaacaagcaattacagattacgggtgaggtaacgggtgccgatggggcgaggctcagaataagtgccatctgtgttaacagcaaagtccacatttgtagatttgtagtagttggaagtgtattgaatctctgggttccagcgtttgctgttttctttctgcagctcccattcaatttccacgctgacctgtccggtgctgtactgcgtgatgaacgacgccagcttagcttgactgaaggtagttggaggatccgcgggaacaggtgtattcttaatcaggatctgaggaggcgggtgtttcagtccaaagccccccatcagcggcgagggatgaaagtttccgtccgtgtgaggaatcttggcccagataggaccctgcaggtacacgtcccggttctgccagaccatgccaggtaaggctccttgactgttgacggcccctacaataggagcggcgttttgctgttgcaggttatcggccaccacgccgtactgttctgtggccactgggttggtggttttaatttcttcctcactggttagcataacgctgctatagtccacgttgccttttccagctccctgtttcccaaacattaagactccgctggacggaaaaaatcgctcttcgtcgtccttgtgggttgccatagcgacaccgggatttaccagagagtctctgccattcagatgatacttggtggcaccggtccaggcaaagttgctgttgttattttgcgacagtgtcgtggagacgcgttgctgccggtagcagggcccgggtagccagtttttggcctgagccgacatgttattaggcccggcctgagaaaatagcaactgctgagttcctgcggtacctcccgtggactgagtccgagacaggtagtacaggtactggtcgatgagggggttcatcagccggtccaggctttggctgtgcgcgtagctgctgtgaaaaggcacgtcctcaaactggtagctgaactcaaagttgttgcccgttctcagcatttgagaaggaaagtactccaggcagtagaaggaggaacggcccacggcctgactgccattgttcagagtcaggtacccgtactgaggaatcatgaagacgtccgccgggaacggaggcaggcagccctggcgcgcagagccgaggacgtacgggagctggtattccgagtccgtaaagacctgaatcgtgctggtaaggttattggcgatggtcttggtgccttcattctgcgtgacctccttgacctggatgttgaagagcttgaagttgagtctcttgggccggaatccccagttgttgttgatgagtcgctgccagtcacgtggtgagaagtggcagtggaatctgttaaagtcaaaatacccccagggggtgctgtagccgaagtaggtgttgtcgttggtgcttcctcccgaagtcccgttggagatttgcttgtagaggtggttgttgtaggtggggagggcccaggttcgggtgctggtggtgatgactctgtcgcccagccatgtggaatcgcaatgccaatttcctgaggaactacccactccgtcggcgccttcgttattgtctgccattggagcgccaccgcctgcagccattgtaccagatcccagaccagaggggcctgcggggggttctccgattggttgagggtcgggcactgactctgagtcgccagtctgcccaaagttgagtctctttttcgcgggctgctggcctttcttgccgatgcccgtagtggagtctggagaacgctggggtgatggctctaccggtctcttctttccaggagccgtcttagcgccttcctcaaccagaccgagaggttcgagaacccgcttcttggcctggaagactgctcgtccgaggttgcccccaaaagacgtatcttcttgcagacgctcctgaaactcggcgtcggcgtggttataccgcaggtacggattgtcacccgctttgagctgctggtcgtaggccttgtcgtgctcgagggccgctgcgtccgccgcgttgacgggctcccccttgtcgagtccgttgaagggtccgaggtacttgtagccaggaagcaccagaccccggccgtcgtcctgcttttgctggttggctttgggcttcggggctccaggtttcagcgcccaccactcgcgaatgccctcagagaggttgtcctcgagccaatctggaagataaccatcggcagccatacctgatctaaatcatttattgttcaaagatgcagtcatccaaatccacattgaccagatcgcaggcagtgcaagcgtctggcacctttcccatgatatgatgaatgtagcacagtttctgatacgcctttttgacgacagaaacgggttgagattctgacacgggaaagcactctaaacagtctttctgtccgtgagtgaagcagatatttgaattctgattcattctctcgcattgtctgcagggaaacagcatcagattcatgcccacgtgacgagaacatttgttttggtacctgtccgcgtagttgatcgaagcttccgcgtctgacgtcgatggctgcgcaactgactcgcgcacccgtttgggctcacttatatctgcgtcactgggggcgggtcttttcttggctccaccctttttgacgtagaattcatgctccacctcaaccacgtgatcctttgcccaccggaaaaagtctttgacttcctgcttggtgaccttcccaaagtcatgatccagacggcgggtgagttcaaatttgaacatccggtcttgcaacggctgctggtgttcgaaggtcgttgagttcccgtcaatcacggcgcacatgttggtgttggaggtgacgatcacgggagtcgggtctatctgggccgaggacttgcatttctggtccacgcgcaccttgcttcctccgagaatggctttggccgactccacgaccttggcggtcatcttcccctcctcccaccagatcaccatcttgtcgacacagtcgttgaagggaaagttctcattggtccagttgacgcagccgtagaagggcgaattc

SEQ ID NO: 149 - protein, 733 aa, Artificial Sequence
  source: /note="Description of Artificial Sequence: Synthetic polypeptide"
MAADGYLPDWLEDNLSEGIREWWDLKPGAPKLKANQQKQDDGRGLVLPGYKYLGPFHGLDKGEPVNAADAAALEHDKAYDQQLKAGDNPYLRYNHADAEFQERLQEDTSFGGNLGRAVFQAKKRVLEPLGLVEEGAKTAPGKKRPLESPQEPDSSSGIGKKGKQPAKKRLNFEEDTGAGDGPPEGSDTSAMSSDIEMRAAPGGNAVDAGQGSDGVGNASGDWHCDSTWSEGKVTTTSTRTWVLPTYNNHLYLRLGTTSNSNTYNGFSTPWGYFDFNRFHCHFSPRDWQRLINNNWGLRPKAMRVKIFNIQVKEVTTSNGETTVANNLTSTVQIFADSSYELPYVMDAGQEGSLPPFPNDVFMVPQYGYCGIVTGENQNQTDRNAFYCLEYFPSQMLRTGNNFEMAYNFEKVPFHSMYAHSQSLDRLMNPLLDQYLWHLQSTTSGETLNQGNAATTFGKIRSGDFAFYRKNWLPGPCVKQQRFSKTASQNYKIPASGGNALLKYDTHYTLNNRWSNIAPGPPMATAGPSDGDFSNAQLIFPGPSVTGNTTTSANNLLFTSEGEIAATNPRDTDMFGQIADNNQNATTAPITGNVTAMGVLPGMVWQNRDIYYQGPIWAKIPHADGHFHPSPLIGGFGLKHPPPQIFIKNTPVPANPATTFTAARVDSFITQYSTGQVAVQIEWEIEKERSKRRNPEVQFTSNYGNQSSMLWAPDTTGKYTEPRVIGSRYLTNHL

SEQ ID NO: 150 - protein, 735 aa, Artificial Sequence
  source: /note="Description of Artificial Sequence: Synthetic polypeptide"
MAADGYLPDWLEDTLSEGIRQWWKLKPGPPPPKPNQQHRDDSRGLVLPGYKYLGPFNGLDKGEPVNEADAAALEHDKAYDHQLKQGDNPYLKYNHADAEFQERLQEDTSFGGNLGRAVFQAKKRVLEPLGLVEEAVKTAPGKKRPIEQSPAEPDSSSGIGKSGQQPAKKRLNFGQTGDTESVPDPQPIGEPPAAPSGVGSNTMASGGGAPMADNNEGADGVGNSSGNWHCDSTWMGDRVITTSTRTWALPTYNNHLYKQISSESGATNDNHYFGYSTPWGYFDFNRFHCHFSPRDWQRLINNNWGFRPKKLNFKLFNIQVKEVTQNDGTTTIANNLTSTVQVFTDSEYQLPYVLGSAHQGCLPPFPADVFMIPQYGYLTLNNGSQAVGRSSFYCLEYFPSQMLRTGNNFTFSYTFEDVPFHSSYAHSQSLDRLMNPLIDQYLYYLSKTQGTSGTTQQSRLQFSQAGPSSMAQQAKNWLPGPSYRQQRMSKTANDNNNSEFAWTAATKYYLNGRNSLVNPGPPMASHKDDEEKYFPMHGNLIFGKQGTGTTNVDIESVLITDEEEIRTTNPVATEQYGQVATNHQSQNTTASYGSVDSQGILPGMVWQDRDVYLQGPIWAKIPHTDGHFHPSPLMGGFGLKHPPPQILIKNTPVPANPATTFTPGKFASFITQYSTGQVSVEIEWELQKENSKRWNPEIQYTSNYNKSVNVEFTVDANGVYSEPRPIGTRYLTRNL

SEQ ID NO: 151 - DNA, 3127 bp, Artificial Sequence
  source: /note="Description of Artificial Sequence: Synthetic polynucleotide"
gcggccgcgaattcgcccttcgcagagaccaaagttcaactgaaacgaatcaaccggtttattgattaacatgcaattacagattacgggtgaggtaacgagtgccaatagggcgaggctcagagtaaacaccctggctgtcaacggcaaagtccacaccagtctgcttttcaaagttggaggtgtactgaatctccgggtcccagcgcttgctgttttccttctgcagctcccactcgatttccacgctgacttgtccggtgctgtactgtgtgatgaacgaagcaaacttggcaggagtaaacacctccggaggattagcgggaacgggagtgttcttgatcaggatctgaggaggcggatgtttaagtccaaagccgcccatcaaaggagacgggtgaaagttgccatccgtgtgaggaatcttggcccagatgggaccctgcaggtacacgtcccggttctgccagaccatgccaggtaaggctccctggttgttgacaacttgtgtctgggctgcagtattagccgcttgtaagttgctgctgactatcccgtattcttccgtggctacaggattagtaggacgaatttcttcttcatttgtcattaacacattttccaatgtagttttgttagttgctccagtttttccaaaaatcaggactccgctggatgggaaaaagcggtcctcgtcgtccttgtgagttgccatggcgacgccgggattaaccaacgagtttctgccgttcaggtgatatttggtggcaccagtccaagcaaagttgctgttgttgttttgatccagcgttttggagaccctttgttgccggaagcagggtccaggtaaccaattcttggcttgttcggccatagttgaaggcccgccctggtaaaactgcagttcccgattgccagctgtgcctcctgggtcactctgtgttctggccaggtagtacaagtactggtcgatgaggggattcatcagccggtccaggctctggctgtgtgcgtagctgctgtggaaaggcacgtcctcgaagctgtagctgaactcaaagttgttgcccgttctcagcatctgagaggggaagtactccaggcagtagaaggaggaacgtcccacagactgactgccattgttgagagtcaggtagccgtactgaggaatcatgaagacgtccgccgggaacggaggcaggcagccctggtgcgcagagccgaggacgtacggcagctggtattccgagtccgagaatacctgaatcgtgctggtaaggttattagcgatggtcgtaacgccgtcattcgtcgtgacctccttgacctggatgttgaagagcttgaaccgcagcttcttgggccggaatccccagttgttgttgatgagtcgctgccagtcacgtggtgagaagtggcagtggaatctgttaaagtcaaaatacccccagggggtgctgtagccgaagtaggtgttgtcgttggtactacctgcagtttcactggagatttgctcgtagaggtggttgttgtaggtgggcagggcccaggttcgggtgctggtggtaatgactctgtcgcccagccatgtggaatcgcaatgccaatttcctgaggcattacccactccgtcggcaccttcgttattgtctgccattggtgcgccaccgcctgcagccactgtaccagatcccacactagagggcgctgctggaggttctccgagaggttgagggtcggggactgactctgagtcgccagtctgaccgaaattgagtctctttctggcgggctgctggcccttcttgccgatgcccgtggaggagtcgggggaacgctgaggtgacggctctaccggtctcttctttgcaggagccgtcttagcgccttcctcaaccagaccgagaggttcgagaacccgcttcttggcctggaagactgctcgcccgaggttgcccccaaatgacgtatcttcttgcagacgctcctgaaactcggcgtcggcgtggttataccgcaggtacgggttgtcacccgcattgagctgctggtcgtaggccttgtcgtgctcgagggccgctgcgtccgccgcgttgacgggctcccccttgtcgagtccgttgaagggtccgaggtacttgtagccaggaagcaccagaccccggccgttgtcctgcttttgctggttggctttgggtttcggggctccaggtttcaggtcccaccactcgcgaatgccctcagagaggttgtcctcgagccaatctggaagataaccatcggcagccatacctgatttaaatcatttattgttcaaagatgcagtcatccaaatccacattgaccagatcgcaggcagtgcaagcgtctggcacctttcccatgatatgatgaatgtagcacagtttctgatacgcctttttgacgacagaaacgggtttagattctgacacgggaaagcactctaaacagtctttctgtccgtgagtgaagcagatatttgaattctgattcattctctcgcattgtctgcagggaaacagcatcagattcatgcccacgtgacgagaacatttgttttggtacctgtctgcgtagttgatcgaagcttccgcgtctgacgtcgatggctgcgcaactgactcgcgcacccgtttgggctcacttatatctgcgtcactgggggcgggtcttttcttggctccaccctttttgacgtagaattcatgctccacctcaaccacgtaatcctttgcccaccggaaaaagtctttgacttcctgcttggtgaccttcccaaagtcatgatccagacggcgggtgagttcaaatttgaacatccggtcttgcaacggctgctggtgttcgaaggtcgttgagttcccgtcgatcacggcgcacatgttggtgttggagatgacgatcgcgggagtcgggtctatctgggccgaggacttgcatttctggtccacgcgcaccttgcttcctccgagaatggctttggccgactccacgaccttggcggtcatcttcccctcctcccaccagatcaccatcttgtcgacacagtcgttgaagggaaagttctcattggtccagttgacgcagccgtagaaagggcgaattc

SEQ ID NO: 152 - protein, 728 aa, Artificial Sequence
  source: /note="Description of Artificial Sequence: Synthetic polypeptide"
MAADGYLPDWLEDNLSEGIREWWDLKPGAPKPKANQQKQDDGRGLVLPGYKYLRPFNGLDKGEPVNEADAAALEHDKAYDKQLEQGDNPYLKYNHADAEFQERLQEDTSFGGNLGRAVFQAKKRVLEPLGLVEEVAKTAPGKKRPIESPDSSTGIGKKGQQPAKKKLNFGQTGDSESVPDPQPLGEPPAAPSGLGSGTMAAGGGAPMADNNEGADGVGNASGNWHCDSTWLGDRVITTSTRTWALPTYNNHLYKQISSQSGATNDNHFFSYSTPWGYFDFNRFHCHFSPRDWQRLINNNWGFRPRKLRFKLFNIQVKEVTTNDGVTTIANNLTSTIQVFSDSEYQLPYVLGSAHQGCLPPFPADVFMIPQYGYLTLNNGSQSVGRSSFYCLEYFPSQMLRTGNNFEFSYTFEEVPFHSSYVHSQSLDRLMNPLIDQYLYYLARTQSTTGSTRELQFHQAGPNTMAEQSKNWLPGPCYRQQRLSKNIDSNNNSNFAWTGATKYHLNGRNSLTNPGVAMATNKDDEDQFFPINGVLVFGKTGAANKTTLENVLMTSEEEIKTTNPVATEEYGVVSSNLQSSTAGPQTQTVNSQGALPGMVWQNRDVCLQGPIWAKIPHTDGNFHPSPLMGGFGLKHPPPQILIKNTPVPANPPEVFTPAKFASFITQYSTGQVSVEIEWELQKENSKRWNPEIQYTSNYAKSNNVEFAVNNEGVYTEPRPIGTRYLTRNL

SEQ ID NO: 153 - DNA, 3106 bp, Artificial Sequence
  source: /note="Description of Artificial Sequence: Synthetic polynucleotide"
gcggccgcgaattcgcccttcgcagagaccaaagttcaactgaaacgaatcaaccggtttattgattaacaagtaattacaggttacgggtgaggtaacgggtgccaatggggcgaggctcagtataaaccccttcgttgttgacagcaaattccacattattagacttggcataatttgaggtgtactgaatctctggattccagcgtttgctgttttctttctgcagttcccactcgatctccacgctgacctggccggtgctgtactgcgtgataaatgaggcaaacttggcaggagtaaacacctctggaggattagcaggtaccggggtgtttttgatgagaatttgaggaggcgggtgtttgagtccaaatccgcccatcaggggagacgggtgaaagttgccgtccgtgtgaggaattttggcccagatgggaccctgcaggcacacgtcccggttctgccagaccatgccgggcagagccccctggctgttgacagtctgtgtctggggtccggccgtagacgattgcaggttgctggagaccacaccgtattcttctgtagccacgggattggtggttttgatctcctcctcgctggtcattagcacgttttccagcgttgtcttgttggcagcccccgttttgccaaaaaccagcactccgttgatgggaaagaactggtcctcgtcgtccttgttggtggccatggctacgcccgggttggttaatgaatttctaccattcagatggtatttagtggccccggtccaggcaaagttactgttgttgttgctgtctatgttttttgacagtctctgctgccgataacagggtccgggcagccagttctttgattgctcggccatggtgttgggcccagcctgatggaactgcagctcccttgtggaccccgtagtgctctgggtccgggccaggtagtacaggtactggtcgatgaggggattcatcagccggtctaggctctggctgtgcacatagctgctgtggaaaggcacttcctcaaaggtgtagctgaattcaaagttattgcccgttctcagcatctgagaaggaaagtactccaggcagtagaaggaggaacgtcccacagactgactgccgttgtttagagtcagatatccgtactgaggaatcatgaacacgtccgcagggaacggagggaggcagccctggtgcgcagagccgaggacgtacggcagttggtactccgagtccgagaagacctgaatcgtgctggtaaggttattagcgatggtcgtaacgccgtcgttcgtcgtgacctccttgacctggatgttgaacaacttgaaccgcagctttctgggccggaatccccagttgttgttgatgagtcgctgccagtcacgtggtgagaagtggcagtggaatctgttgaagtcaaaatagccccagggggtgctgtagctgaagaagtggttgtcgttggtagccccgctctgacttgatatctgcttgtagaggtggttgttgtaggtgggcagggcccaggtgcgggtgctggtggtgatgactctgtcgcccagccatgtggaatcgcaatgccaatttccggaggcattacccactccgtcggcgccttcgttattgtctgccattggtgcgccaccgcctgcagccattgtaccagatcccagacctgagggcgcggcgggaggttctccgagaggttgggggtcgggcactgactctgagtcgccagtctgcccaaagttgagcttctttttagcgggctgctggcctttcttgccgatgcccgtggaggagtcgggggattctatgggtctcttctttccaggagccgtcttagcgacttcctcaaccagaccgagaggttcgagaacccgcttcttggcctggaagactgctcgcccgaggttgcccccaaaagacgtatcttcttgaagacgctcctgaaactcggcgtcggcgtggttgtacttgaggtacgggttgtccccctgctcgagctgcttgtcgtaggccttgtcgtgctcgagggccgcggcgtctgcctcgttgaccggctctcccttgtcgagtccgttgaagggtctgaggtacttgtagccaggaagcaccagaccccggccgtcgtcctgcttttgctggttggctttgggtttcggggctccaggtttcaagtcccaccactcgcgaatgccctcagagaggttgtcctcgagccaatctggaagataaccatcggcagccatacctggtttaagtcatttattgctcagaaacacagtcatccaggtccacgttgaccagatcgcaggccgagcaagcaatctcgggagcccgccccagcagatgatgaatggcacagagtttccgatacgtcctctttctgacgaccggttgagattctgacacgccggggaaacattctgaacagtctctggtcccgtgcgtgaagcaaatgttgaaattctgattcactctctcgcatgtcttgcagggaaacagcatctgaagcatgcccgcgtgacgagaacatttgttttggtacctgtcggcaaagtccaccggagctccttccgcgtctgacgtcgatggattcgcgactgaggggcaggcccgcttgggctcgcttttatccgcgtcatcgggggcgggtctcttgttggccccaccctttctgacgtagaacccatgcgccacctcggtcacgtgatcctgcgcccagcggaagaaccttttgacttcctgctttgtcaccttgccaaagttatgctccagacggcgggtgggttcaaatttgaacatccggtcctgcaacggctgctggtgctcgaaggtggcgctgttcccgtcaatcacggcgcacatgttggtgttggaggtgacggtcacgggggtggggtcgatctgggcggacgacttgcacttttggtccacgcgcaccttgctgccgccgagaatggccttggcggactccacgaccttggccgtcatcttgccctcctcccaccagatcaccatcttgtcggcgcaatcgttgaagggaaagttctcattggtccagttgacgcagccgtagaaagggcgaattc

SEQ ID NO: 154 - protein, 728 aa, Artificial Sequence
  source: /note="Description of Artificial Sequence: Synthetic polypeptide"
MAADGYLPDWLEDNLSEGIREWWDLKPGAPKPKANQQKQDDGRGLVLPGYKYLGPFNGLDKGEPVNEADAAALEHDKAYDKQLEQGDNPYLKYNHADAEFQERLQEDTSFGGNLGRAVFQAKKRVLEPLGLVEEGAKTASGKKRPIESPDSSTGIGKKGQQPAKKKLNFGQTGDSESVPDPQPLGEPPAAPSGLGSGTMAAGGGAPMADNNEGADGVGNASGNWHCDSTWLGDRVITTSTRTWALPTYNNHLYKQISSQSGATNDNHFFGYSTPWGYFDFNRFHCHFSPRDWQRLINNNWGFRPRKLRFKLFNIQVKEVTTNDGVTTIANNLTSTIQVFSDSEYQLPYVLGSAHQGCLPPFPADVFMIPQYGYLTLNNGSQSVGRSSFCCLEYFPSQMLRTGNNFEFSYTFEEVPFHSSYAHSQSLDRLMNPLIDQYLYYLARTQSTTGSTRELQFHQAGPNTVAEQSKNWLPGPCYRQQRLSKNIDSNNNSNFAWTGATKYHLNGRNSLTNPGVAMATNKDDEDQFLPINGVLVFGKTGAANKTTLENVLMTSEEEIKTTNPVATEEYGVVSSNLQSSTAGPRTQTVNSQGALPGMVWQNRDVYLQGPIWAEIPHTDGNFHPSPLMGGFGLKHPPPQILIKNTPVPANPPEVFTPAKFASFITQYSTGQVSVEIEWELQKENSKRWNPEIQYTSNYAKSNNVEFAVNNEGVYTEPRPIGTRYLTRNL

SEQ ID NO: 155 - DNA, 3102 bp, Artificial Sequence
  source: /note="Description of Artificial Sequence: Synthetic polynucleotide"
gcggccgcgaattcgcccttcgcagagaccaaagttcaactgaaacgaatcaaccggtttattgattaacaagtaattacaggttacgggtgaggtaacgggtgccaatggggcgaggctcagtataaaccccttcgttgttgacagcaaattccacattattagacttggcataatttgaggtgtactgaatctctggattccagcgtttgctgttttctttctgcagttcccactcgatctccacgctgacctggccggtgctgtactgcgtgataaatgaggcaaacttggcaggagtaaacacctctggaggattagcaggtaccggggtgtttttgatgagaatttgaggaggcgggtgtttgagtccaaatccgcccatcaggggagacgggtgaaagttgccgtccgtgtgaggaatttcggcccagatgggaccctgcaggtacacgtcccggttctgccagaccatgccgggcagagccccctggctgttgacagtctgtgtccggggtccggccgtagacgattgcaggttgctggagaccacaccgtattcttctgtagccacgggattggtggttttgatctcctcctcgctggtcattagcacgttttccagcgttgtcttgttggcagcccccgttttgccaaaaaccagcactccgttgatgggaaggaactggtcctcgtcgtccttgttggtggccatggctacgcccgggttggttaatgaatttctaccattcagatggtatttagtggccccggtccaggcaaagttactgttgttgttgctgtctatgttttttgacagtctctgctgccgataacagggtccgggcagccagttctttgattgctcggccacggtgttgggcccagcctgatggaactgcagctcccttgtggaccccgtagtgctctgggtccgggccaggtagtacaggtactggtcgatgaggggattcatcagccggtccaggctctggctgtgcgcatagctgctgtggaaaggcacttcctcaaaggtgtagctgaattcaaagttattgcccgttctcagcatctgagaaggaaagtactccaggcagcagaaggaggaacgtcccacagactgactgccgttgtttagagtcagatatccgtactgaggaatcatgaacacgtccgcagggaacggagggaggcagccctggtgcgcagagccgaggacgtacggcagttggtactccgagtccgagaagacctgaatcgtgctggtaaggttattagcgatggtcgtaacgccgtcgttcgtcgtgacctccttgacctggatgttgaacaacttgaaccgcagctttctgggccggaatccccagttgttgttgatgagtcgctgccagtcacgtggtgagaagtggcagtggaatctgttgaagtcaaaatagccccagggggtgctgtagccgaagaagtggttgtcgttggtagccccgctctgacttgatatctgcttgtagaggtggttgttgtaggtgggcagggcccaggtgcgggtgctggtggtgatgactctgtcgcccagccatgtggaatcgcaatgccaatttccggaggcattacccactccgtcggcgccttcgttattgtctgccattggtgcgccaccgcctgcagccattgtaccagatcccagacctgagggcgcggcgggaggttctccgagaggttgggggtcgggcactgactctgagtcgccagtctgcccaaagttgagcttctttttagcgggctgctggcctttcttgccgatgcccgtggaggagtcgggggattctatgggtctcttctttccggaagccgtcttagcgccttcctcaaccagaccgagaggttcgagaacccgcttcttggcctggaagactgctcgcccgaggttgcccccaaaagacgtatcttcttgaagacgctcctgaaactcggcgtcggcgtggttgtacttgaggtacgggttgtccccctgctcgagctgcttgtcgtaggccttgtcgtgctcgagggccgcggcgtctgcctcgttgaccggctctcccttgtcgagtccgttgaagggtccgaggtacttgtagccaggaagcaccagaccccggccgtcgtcctgcttttgctggttggctttgggtttcggggctccaggtttcaagtcccaccactcgcgaatgccctcagagaggttgtcctcgagccaatctggaagataaccatcggcagccatacctggtttaagtcatttattgctcagaaacacagtcatccaggtccacgttgaccagatcgcaggccgagcaagcaatctcgggagcccgccccagcagatgatgaatggcacagagtttccgatacgtcctctttctgacgaccggttgagattctgacacgccggggaaacattctgaacagtctctggtcccgtgcgtgaagcaaatgttgaaattctgattcattctctcgcatgtcttgcagggaaacagcatctgaagcatgcccgcgtgacgagaacatttgttttggtacctgtcggcaaagtccaccggagctccttccgcgtctgacgtcgatggatccgcgactgaggggcaagcccgcttgggctcgcttttatccgcgtcatcgggggcgggtctcttgttggctccaccctttctgacgtagaactcatgcgccacctcggtcacgtgatcctgcgcccagcggaagaactctttgacttcctgctttgtcaccttgccaaagtcatgctccagacggcgggtgagttcaaatttgaacatccggtcttgtaacggctgctggtgctcgaaggtggtgctgttcccgtcaatcacggcgcacatgttggtgttggaagtgacgatcacgggggtgggatcgatctgggcggacgacttgcacttttggtccacgcgcaccttgctgccgccgagaatggccttggcggactccacgaccttggccgtcatcttgccctcctcccaccagatcaccatcttgtcgacgcaatcgttgaagggaaagttctcattggtccagttgacgcagccgaagggcgaattc

SEQ ID NO: 156 - protein, 728 aa, Artificial Sequence
  source: /note="Description of Artificial Sequence: Synthetic polypeptide"
MAADGYLPDWLEDNLSEGIREWWDLKPGAPKPKANQQKQDDGRGLVLPGYRYLGPFNGLDKGEPVNEADAAALEHDKAYDKQLEQGDNPYLKYNHADAEFQERLQEDTSFGGNLGRAVFQAKKRVLEPLGLVEEGAKTAPGKKRPIESPDSSTGIGKNGQPPAKKKLNFGQTGDSESVPDPQPLGEPPAAPSGLGSGTMAAGGGAPMADNNEGADGVGNASGNWHCDSTWLGDRVITTSTRTWALPTYNNHLYKQISSQSGATNDNHFFGYSTPWGYFDFNRFHCHFSPRDWQRLINNNWGFRPRKLRFKLFNIQVKEVTTNDGVTTIANNLTSTIQVFSDSEYQLPYVLGSAHQGCLPPFPADVFMIPQYGYLTLNNGSQSVGRSSFYCLEYFPSQMLRTGNNFEFSYTFEEVPFHSSYAHSQSLDRLMNPLIDQYLYYLARTQSTTGSTRELQFHQAGPNTMAEQSKNWLPGPCYRQQRLSKNIDSNNNSNFAWTGATKYHLNGRNSLTNPGVAMATNKDDEDQFFPINGVLVFGKTGAANKTTLENVLMTSEEEIKTTNPVATEEYGVVSSNLQSSTAGPQTQTVNSQGALPGMVWQNRDVYLQGPIWAKIPHTDGNFHPSPLMGGFGLKHPPPQILIKNTPVPANPPEVFTPAKFASFITQYSTGQVSVEIEWELQKENSKRWNPEIQYTSNYAKSNNVEFAVNNEGVYTEPRPIGTRYLTRNL

SEQ ID NO: 157 - protein, 728 aa, Artificial Sequence
  source: /note="Description of Artificial Sequence: Synthetic polypeptide"
MAADGYLPDWLEGNLSEGIREWWDLKPGAPKPKANQQKQDDGRGLVLPGYRYLGPFNGLDKGEPVNEADAAALEHDKAYDKQLEQGDNPYLKYNHADAEFQERLQEDTSFGGNLGRAVFQAKKRVLEPLGLVEEGAKTAPGKKRPIESPDSSTGIGKNGQPPAKKKLNFGQTGDSESVPDPQPLGEPPAAPSGLGSGTMAAGGGAPMADNNEGADGVGNASGNWHCDSTWLGDRVITTSTRTWALPTYNNHLYKQISSQSGATNDNHFFGYSTPWGYFDFNRFHCHFSPRDWQRLINNNWGFRPRKLRFKLFNIQVKEVTTNDGVTTIANNLTSTIQVFSDSEYQLPYVLGSAHQGCLPPFPADVFMIPQYGYLTLNNGSQSVGRSSFYCLEYFPSQMLRTGDNFEFSYTFEEVPFHSSYAHSQSLDRLMNPLIDQYLYYLARTQSTTGSTRELQFHQAGPNTMAEQSKNWLPGPCYRQQRLSKNIDSNNNSNFAWTGATKYHLNGRNSLTNPGVAMATNKDDEDQFFPINGVLVFGKTGAANKTTLENVLMTSEEEIKTTNPVATEEYGVVSSNLQSSTAGPQTQTVNSQGALPGMVWQNRDVYLQGPIWAKIPHTDGNFHPSPLMGGFGLKHPPPQILIKNTPVPANPPEVFTPAKFASFITQYSTGQVSVEIEWELQKENSKRWNPEIQYTSNYAKSNNVEFAVNNEGVYTEPRPIGTRYLTRNL

SEQ ID NO: 158 - DNA, 3106 bp, Artificial Sequence
  source: /note="Description of Artificial Sequence: Synthetic polynucleotide"
gcggccgcgaattcgcccttcgcagagaccaaagttcaactgaaacgaatcagccggtttattgattaacaagtaattacaggttacgggtgaggtaacgggtgccaatggggcgaggctcagtataaaccccttcgttgttgacagcaaattccacattattagacttggcataatttgaggtgtactgaatctctggattccagcgtttgctgttttctttctgcagttcccactcgatctccacgctgacctggccggtgctgtactgcgtgataaatgaggcaaacttggcaggagtaaacacctctggaggattagcaggtaccggggtgtttttgatgagaatttgaggaggcgggtgtttgagtccaaatccgcccatcaggggagacgggtgaaagttgccgtccgtgtgaggaattttggcccagatgggaccctgcaggtacacgtcccggttctgccagaccatgccgggcagagccccctggctgttgacagtctgtgtctggggtccggccgtagacgattgcaggttgctggagaccacaccgtattcttctgtagccacgggattggtggttttgatctcctcctcgctggtcattagcacgttttccagcgttgtcttgttggcagcccccgttttgccaaaaaccagcactccgttgatgggaaagaactggtcctcgtcgtccttgttggtggccatggctacgcccgggttggttaatgaatttctaccattcagatggtatttagtggccccggtccaggcaaagttactgttgttgttgctgtctatgttttttgacagtctctgctgccgataacagggtccgggcagccagttctttgattgctcggccatggtgttgggcccagcctgatggaactgcagctcccttgtggaccccgtagtgctctgggtccgggccaggtagtacaggtactggtcgatgaggggattcatcagccggtccaggctctggctgtgcgcatagctgctgtggaaaggcacttcctcaaaggtgtagctgaattcaaagttatcgcccgttctcagcatctgagaaggaaagtactccaggcagtagaaggaggaacgtcccacagactgactgccgttgtttagagtcagatatccgtactgaggaatcatgaacacgtccgcagggaacggagggaggcagccctggtgcgcagagccgaggacgtacggcagttggtactccgagtccgagaagacctgaatcgtgctggtaaggttattagcgatggtcgtaacgccgtcgttcgtcgtgacctccttgacctggatgttgaacaacttgaaccgcagctttctgggccggaatccccagttgttgttgatgagtcgctgccagtcacgtggtgagaagtggcagtggaatctgttgaagtcaaaatagccccagggggtgctgtagccgaagaagtggttgtcgttggtagccccgctctgacttgatatctgcttgtagaggtggttgttgtaggtgggcagggcccaggtgcgggtgctggtggtgatgactctgtcgcccagccatgtggaatcgcaatgccaatttccggaggcattacccactccgtcggcgccttcgttattgtctgccattggtgcgccaccgcctgcagccattgtaccagatcccagacctgagggcgcggcgggaggttctccgagaggttgggggtcgggcactgactctgagtcgccagtctgcccaaagttgagcttctttttagcgggcggctggccgttcttgccgatgcccgtggaggagtcgggggattctatgggtctcttctttccaggagccgtcttagcgccttcctcaaccagaccgagaggttcgagaacccgcttcttggcctggaagactgctcgcccgaggttgcccccaaaagacgtatcttcttgaagacgctcctgaaactcggcgtcggcgtggttgtacttgaggtacgggttgtccccctgctcgagctgcttgtcgtaggccttgtcgtgctcgagggccgcggcgtctgcctcgttgaccggctctcccttgtcgagtccgttgaagggtccgaggtacctgtagccaggaagcaccagaccccggccgtcgtcctgcttttgctggttggctttgggtttcggggctccaggtttcaagtcccaccactcgcgaatgccctcagagaggttgccctcgagccaatctggaagataaccatcggcagccatacctggtttaagtcatttattgctcagaaacacagtcatccaggtccacgttggccagatcgcaggccgagcaagcaatctcgggagcccgccccagcagatgatgaatggcacagagtttccgatacgtcctctttctgacgaccggttgagattctgacacgccggggaaacattctgaacagtctctggtcccgtgcgtgaagcaaatgttgaaattctgattcattctctcgcatgtcttgcaggggaacagcatctgaagcatgcccgcgtgacgagaacatttgttttggtacctgtcggcaaagtccaccggagctccttccgcgtctgacgtcgatggatccgcgactgaggggcaggcccgcttgggctcgcttttatccgcgtcatcgggggcgggtctcttgttggctccaccctttctgacgtagaactcatacgccacctcggtcacgtgatcctgcgcccagcggaagaactctttgacttcctgctttgtcaccttgccaaagtcatgctccagacggcgggtgagttcaaatttgaacatccggtcttgtaacggctgctggtgctcgaaggtggtgctgttcccgtcaatcacggcgcacatgttggtgttggaagtgacgatcacgggggtgggatcgatctgggcggacgacttgcacttttggtccacgcgcaccttgctgccgccgagaatggccttggcggactccacgaccttggccgtcatcctgccctcctcccaccagatcaccatcttgtcgacgcaatcgttgaagggaaagttctcattggtccagttgacgcagccgtagaaagggcgaattc

SEQ ID NO: 159 - protein, 728 aa, Artificial Sequence
  source: /note="Description of Artificial Sequence: Synthetic polypeptide"
MAADGYLPDWLEDNLSEGIREWWDLKPGAPKPKANQQKQDDGRGLVLPGYKYLGPFNGLDKGEPVNEADAAALEHDKAYDKQLEQGDNPYLKYNHADAEFQERLQEDTSFGGNLGRAVFQAKKRVLEPLGLVEEGAKTAPGKKRPIESPDSSTGIGKKGQQPAKKKLNFGQTGDSESVPDPQPLGEPPAAPSGLGSGTMAAGGGAPMADNNEGADGVGNASGNWHCDSTWLGDRVITTSTRTWALPTYNNHLYKQISSQSGATNDNHFFGYSTPWGYFDFNRFHCHFSPRDWQRLINNNWGFRPRKLRFKLFNIQVKEVTTNDGVTTIANNLTSTIQVFSDSEYQLPYVLGSAHQGCLPPFPADVFMIPQYGYLTLNNGSQSMGRSSFYCLEYFPSQMLRTGNNFEFSYTFEEVPFHSSYAHSQSLDRLMNPLIDQYLYYLARTQSTTGSTRELQFHQAGPNTMAEQSKNWLPGPCYRQQRLSKNIDSNNNSNFAWTGATKYHLNGRNSLTNPGVAMATNKDDEGQFFPINGVLVFGKTGAANKTTLENVLMTSEEEIKTTNPVATEEYGVVSSNLQSSTAGPQTQTVNSQGALPGMVWQNRDVYLQGPIWAKIPHTDGNFHPSPLMGGFGLKHPPPQILIKNTPVPANPPGVFTPALFASFITQYSTGQVSVEIEWELQKENSKRWNPEIQYTSNYAKSNNVEFAVNNEGVYTEPRPIGTRYLTRNL

SEQ ID NO: 160 - DNA, 3098 bp, Artificial Sequence
  source: /note="Description of Artificial Sequence: Synthetic polynucleotide"
gaattcgcccttcgcagagaccaaagttcaactgaaacgaatcaaccggtttattgattaacaagtaattacaggttacgggtgaggtaacgggtgccaatggggcgaggctcagtataaaccccttcgttgttgacagcaaattccacattattagacttggcataatttgaggtgtactgaatctctggattccagcgtttgctgttttctttctgcagttcccactcgatctccacgctgacctggccggtgctgtactgcgtgataaatgaggcaaactaggcaggagtaaacacccctggaggattagcaggtaccggggtgtttttgatgagaatttgaggaggcgggtgtttgagtccaaatccgcccatcaggggagacgggtgaaagttgccgtccgtgtgaggaattttggcccagatgggaccctgcaggtacacgtcccggttctgccagaccatgccgggcagagccccctggctgttgacagtctgtgtctggggtccggccgtagacgattgcaggttgctggagaccacaccgtattcttctgtagccacgggattggtggttttgatctcctcctcgctggtcattagcacgttttccagcgttgtcttgttggcagcccccgttttgccaaaaaccagcactccgttgatgggaaagaactggccctcgtcgtccttgttggtggccatggctacgcccgggttggttaatgaatttctaccattcagatggtatttagtggccccggtccaggcaaagttactgttgttgttgctgtctatgttttttgacagtctctgctgccgataacagggtccgggcagccagttctttgattgctcggccatggtgttgggcccagcctgatggaactgcagctcccttgtggaccccgtagtgctctgggtccgggccaggtagtacaggtactggtcgatgaggggattcatcagccggtccaggctctggctgtgcgcatagctgctgtggaaaggcacttcctcaaaggtgtagctgaattcaaagttattgcccgttctcagcatctgagaaggaaagtactccaggcagtagaaggaggaacgtcccatagactgactgccgttgtttagagtcagatatccgtactgaggaatcatgaacacgtccgcagggaacggagggaggcagccctggtgcgcagagccgaggacgtacggcagttggtactccgagtccgagaagacctgaatcgtgctggtaaggttattagcgatggtcgtaacgccgtcgttcgtcgtgacctccttgacctggatgttgaacaacttgaaccgcagctttctgggccggaatccccagttgttgttgatgagtcgctgccagtcacgtggtgagaagtggcagtggaatctgttgaagtcaaaatagccccagggggtgctgtagccgaagaagtggttgtcgttggtagccccgctctgacttgatatctgcttgtagaggtggttgttgtaggtgggcagggcccaggtgcgggtgctggtggtgatgactctgtcgcccagccatgtggaatcgcaatgccaatttccggaggcattacccactccgtcggcgccttcgttattgtctgccattggtgcgccaccgcctgcagccattgtaccagatcccagacctgagggcgcggcgggaggttctccgagaggttgggggtcgggcactgactctgagtcgccagtctgcccaaagttgagcttctttttagcgggctgctggcctttcttgccgatgcccgtggaggagtcgggggattctatgggtctcttctttccaggagccgtcttagcgccttcctcaaccagaccgagaggttcgagaacccgcttcttggcctggaagactgctcgcccgaggttgcccccaaaagacgtatcttcttgaagacgctcctgaaactcagcgtcggcgtggttgtacttgaggtacgggttgtccccctgctcgagctgcttgtcgtaggccttgtcgtgctcgagggccgcggcgtctgcctcgttgaccggctctcccttgtcgagtccgttgaagggtccgaggtacttgtagccaggaagcaccagaccccggccgtcgtcctgcttttgctggttggctttgggtttcggggctccaggtttcaagtcccaccactcgcgaatgccctcagagaggttgtcctcgagccaatctggaagataaccatcggcagccatacctggtttaagtcatttattgctcagaaacacagtcatccaggtccacgttgaccagatcgcaggccgagcaagcaatctcgggagcccgccccagcagatgatgaatggcacagagtttccgatacgtcctctttctgacgaccggttgagattctgacacgccggggaaacattctgaacagtctctggtcccgtgcgtgaagcaaatgttgaaattctgattcattctctcgcatgtcttgcagggaaacagcatctgaagcatgcccgcgtgacgagaacatttgttttggtacctgtcggcaaagtccaccggagctccttccgcgtctgacgtcgatggatccgcgactgaggggcaggcccgcttgggctcgcttttatccgcgtcatcgggggcgggcctcttgttggctccaccctttctgacgtagaactcatgcgccacctcggtcacgtgatcctgcgcccagcggaagaactctttgacttcctgctttgtcaccttgccaaagtcctgctccagacggcgggtgagttcaaatttgaacatccggtcttgtaacggctgctggtgctcgaaggtggtgctgttcccgtcaatcacggcgcacatgttggtgttggaagtgacgatcacgggggtgggatcgatctgggcggacgacttgcacttttggtccacgcgcaccttgctgccgccgagaatggccttggcggactccacgaccttggccgtcatcttgccctcctcccaccagatcaccatcttgtcgacgcaatcgttgaagggaaagttctcattggtccagttgacgcagccgtagaaagggcgaattc

SEQ ID NO: 161 - DNA, 2187 bp, Artificial Sequence
  source: /note="Description of Artificial Sequence: Synthetic polynucleotide"
atggctgccgatggttatcttccagattggctcgagggcaacctctctgagggcattcgcgagtggtgggacttgaaacctggagccccgaaacccaaagccaaccagcaaaagcaggacgacggccggggtctggtgcttcctggctacaggtacctcggacccttcaacggactcgacaagggagagccggtcaacgaggcagacgccgcggccctcgagcacgacaaggcctacgacaagcagctcgagcagggggacaacccgtacctcaagtacaaccacgccgacgccgagtttcaggagcgtcttcaagaagatacgtcttttgggggcaacctcgggcgagcagtcttccaggccaagaagcgggttctcgaacctctcggtctggttgaggaaggcgctaagacggctcctggaaagaagagacccatagaatcccccgactcctccacgggcatcggcaagaacggccagccgcccgctaaaaagaagctcaactttgggcagactggcgactcagagtcagtgcccgacccccaacctctcggagaacctcccgccgcgccctcaggtctgggatctggtacaatggctgcaggcggtggcgcaccaatggcagacaataacgaaggcgccgacggagtgggtaatgcctccggaaattggcattgcgattccacatggctgggcgacagagtcatcaccaccagcacccgcacctgggccctgcccacctacaacaaccacctctacaagcagatatcaagtcagagcggggctaccaacgacaaccacttcttcggctacagcaccccctggggctattttgacttcaacagattccactgccacttctcaccacgtgactggcagcgactcatcaacaacaactggggattccggcccagaaagctgcggttcaagttgttcaacatccaggtcaaggaggtcacgacgaacgacggcgttacgaccatcgctaataaccttaccagcacgattcaggtcttctcggactcggagtaccaactgccgtacgtcctcggctctgcgcaccagggctgcctccctccgttccctgcggacgtgttcatgattcctcagtacggatatctgactctaaacaacggcagtcagtctgtgggacgttcctccttctactgcctggagtactttccttctcagatgctgagaacgggcgataactttgaattcagctacacctttgaggaagtgcctttccacagcagctatgcgcacagccagagcctggaccggctgatgaatcccctcatcgaccagtacctgtactacctggcccggacccagagcactacggggtccacaagggagctgcagttccatcaggctgggcccaacaccatggccgagcaatcaaagaactggctgcccggaccctgttatcggcagcagagactgtcaaaaaacatagacagcaacaacaacagtaactttgcctggaccggggccactaaataccatctgaatggtagaaattcattaaccaacccgggcgtagccatggccaccaacaaggacgacgaggaccagttctttcccatcaacggagtgctggtttttggcaaaacgggggctgccaacaagacaacgctggaaaacgtgctaatgaccagcgaggaggagatcaaaaccaccaatcccgtggctacagaagaatacggtgtggtctccagcaacctgcaatcgtctacggccggaccccagacacagactgtcaacagccagggggctctgcccggcatggtctggcagaaccgggacgtgtacctgcagggtcccatctgggccaaaattcctcacacggacggcaactttcacccgtctcccctgatgggcggatttggactcaaacacccgcctcctcaaattctcatcaaaaacaccccggtacctgctaatcctccagaggtgtttactcctgccaagtttgcctcatttatcacgcagtacagcaccggccaggtcagcgtggagatcgagtgggaactgcagaaagaaaacagcaaacgctggaatccagagattcagtacacctcaaattatgccaagtctaataatgtggaatttgctgtcaacaacgaaggggtttatactgagcctcgccccattggcacccgttacctcacccgtaacctgtaa

SEQ ID NO: 162 - protein, 728 aa, Artificial Sequence; identical to SEQ ID NO: 157
  source: /note="Description of Artificial Sequence: Synthetic polypeptide"

SEQ ID NO: 163 - protein, 728 aa, Artificial Sequence
  source: /note="Description of Artificial Sequence: Synthetic polypeptide"
MAADGYLPDWLEDNLSEGIREWWDLKPGAPKPKANQQKQDDGRGLVLPGYRYLGPFNGLDKGEPVNEADAAALEHDKAYDKQLEQGDNPYLKYNHADAEFQERLQEDTSFGGNLGRAVFQAKKRVLEPLGLVEEGAKTAPGKKRPIESPDSSTGIGKNGQPPAKKKLNFGQTGDSESVPDPQPLGEPPAAPSGLGSGTMAAGGGAPMADNNEGADGVGNASGNWHCDSTWLGDRVITTSTRTWALPTYNNHLYKQISSQSGATNDNHFFGYSTPWGYFDFNRFHCHFSPRDWQRLINNNWGFRPRKLRFKLFNIQVKEVTTNDGVTTIANNLTSTIQVFSDSEYQLPYVLGSAHQGCLPPFPADVFMIPQYGYLTLNNGSQSVGRSSFYCLEYFPSQMLRTGDNFEFSYTFEEVPFHSSYAHSQSLDRLMNPLIDQYLYYLARTQSTTGSTRELQFHQAGPNTMAEQSKNWLPGPCYRQQRLSKNIDSNNNSNFAWTGATKYHLNGRNSLTNPGVAMATNKDDEDQFFPINGVLVFGKTGAANKTTLENVLMTSEEEIKTTNPVATEEYGVVSSNLQSSTAGPQTQTVNSQGALPGMVWQNRDVYLQGPIWAKIPHTDGNFHPSPLMGGFGLKHPPPQILIKNTPVPANPPEVFTPAKFASFITQYSTGQVSVEIEWELQKENSKRWNPEIQYTSNYAKSNNVEFAVNNEGVYTEPRPIGTRYLTRNL

SEQ ID NO: 164 - protein, 728 aa, Artificial Sequence; identical to SEQ ID NO: 156
  source: /note="Description of Artificial Sequence: Synthetic polypeptide"

SEQ ID NO: 165 - protein, 728 aa, Artificial Sequence
  source: /note="Description of Artificial Sequence: Synthetic polypeptide"
MAADGYLPDWLEDNLSEGIREWWDLKPGAPKPKANQQKQDDGRGLVLPGYKYLGPFNGLDKGEPVNEADAAALEHDKAYDKQLEQGDNPYLKYNHADAEFQERLQEDTSFGGNLGRAVFQAKKRVLEPLGLVEEGAKTAPGKKRPIESPDSSTGIGKNGQPPAKKKLNFGQTGDSESVPDPQPLGEPPAAPSGLGSGTMAAGGGAPMADNNEGADGVGNASGNWHCDSTWLGDRVITTSTRTWALPTYNNHLYKQISSQSGATNDNHFFGYSTPWGYFDFNRFHCHFSPRDWQRLINNNWGFRPRKLRFKLFNIQVKEVTTNDGVTTIANNLTSTIQVFSDSEYQLPYVLGSAHQGCLPPFPADVFMIPQYGYLTLNNGSQSVGRSSFYCLEYFPSQMLRTGNNFEFSYTFEEVPFHSSYAHSQSLDRLMNPLIDQYLYYLARTQSTTGSTRELQFHQAGPNTMAEQSKNWLPGPCYRQQRLSKNIDSNNNSNFAWTGATKYHLNGRNSLTNPGVAMATNKDDEDQFFPINGVLVFGKTGAANKTTLENVLMTSEEEIKTTNPVATEEYGVVSSNLQSSTAGPQTQTVNSQGALPGMVWQNRDVYLQGPIWAKIPHTDGNFHPSPLMGGFGLKHPPPQILIKNTPVPANPPEVFTPAKFASFITQYSTGQVSVEIEWELQKENSKRWNPEIQYTSNYAKSNNVEFAVNNEGVYTEPRPIGTRYLTRNL

SEQ ID NO: 166 - protein, 728 aa, Artificial Sequence
  source: /note="Description of Artificial Sequence: Synthetic polypeptide"
MAADGYLPDWLEDNLSEGIREWWDLKPGAPKPKANQQKQDDGRGLVLPGYKYLGPFNGLDKGEPVNEADAAALEHDKAYDKQLEQGDNPYLKYNHADAEFQERLQEDTSFGGNLGRAVFQAKKRVLEPLGLVEEGAKTAPGKKRPIESPDSSTGIGKKGQQPAKKKLNFGQTGDSESVPDPQPLGEPPAAPSGLGSGTMAAGGGAPMADNNEGADGVGNASGNWHCDSTWLGDRVITTSTRTWALPTYNNHLYKQISSQSGATNDNHFFGYSTPWGYFDFNRFHCHFSPRDWQRLINNNWGFRPRKLRFKLFNIQVKEVTTNDGVTTIANNLTSTIQVFSDSEYQLPYVLGSAHQGCLPPFPADVFMIPQYGYLTLNNGSQSVGRSSFYCLEYFPSQMLRTGNNFEFSYTFEEVPFHSSYAHSQSLDRLMNPLIDQYLYYLARTQSTTGSTRELQFHQAGPNTMAEQSKNWLPGPCYRQQRLSKNIDSNNNSNFAWTGATKYHLNGRNSLTNPGVAMATNKDDEDQFFPINGVLVFGKTGAANKTTLENVLMTSEEEIKTTNPVATEEYGVVSSNLQSSTAGPQTQTVNSQGALPGMVWQNRDVYLQGPIWAKIPHTDGNFHPSPLMGGFGLKHPPPQILIKNTPVPANPPEVFTPAKFASFITQYSTGQVSVEIEWELQKENSKRWNPEIQYTSNYAKSNNVEFAVNNEGVYTEPRPIGTRYLTRNL

SEQ ID NO: 167 - DNA, 2215 bp, Artificial Sequence
  source: /note="Description of Artificial Sequence: Synthetic polynucleotide"
atggctgccgatggttatcttccagattggctcgaggacactctctctgaaggaataagacagtggtggaagctcaaacctggcccaccaccaccaaagcccgcagagcggcataaggacgacagcaggggtcttgtgcttcctgggtacaagtacctcggacccttcaacggactcgacaagggagagccggtcaacgaggcagacgccgcggccctcgagcacgacaaagcctacgaccggcagctcgacagcggagacaacccgtacctcaagtacaaccacgccgacgccgagttccaggagcggctcaaagaagatacgtcttttgggggcaacctcgggcgagcagtcttccaggccaaaaagaggcttcttgaacctcttggtctggttgaggaagcggctaagacggctcctggaaagaagaggcctgtagagcactctcctgtggagccagactcctcctcgggaaccggaaaggcgggccagcagcctgcaagaaaaagattgaattttggtcagactggagacgcagactcagtcccagaccctcaaccaatcggagaacctcccgcagccccctcaggtgtgggatctcttacaatggctgcaggcggtggcgcaccaatggcagacaataacgagggcgccgacggagtgggtaattcctcgggaaattggcattgcgattccacatggatgggcgacagagtcatcaccaccagcacccgaacctgggccctgcccacctacaacaaccacctctacaagcaaatctccaacagcacatctggaggatcttcaaatgacaacgcctacttcggctacagcaccccctgggggtattttgactttaacagattccactgccacttttcaccacgtgactggcagcgactcatcaacaacaactggggattccggcccaagagactcagcttcaagctcttcaacatccaggtcaaggaggtcacgcagaatgaaggcaccaagaccatcgccaataacctcaccagcaccatccaggtgtttacggactcggagtaccagctgccgtacgttctcggctctgcccaccagggctgcctgcctccgttcccggcggacgtgttcatgattccccagtacggctacctaacactcaacaacggtagtcaggccgtgggacgctcctccttctactgcctggaatactttccttcgcagatgctgagaaccggcaacaacttccagtttacttacaccttcgaggacgtgcctttccacagcagctacgcccacagccagagcttggaccggctgatgaatcctctgattgaccagtacctgtactacttgtctcggactcaaacaacaggaggcacgacaaatacgcagactctgggcttcagccaaggtgggcctaatacaatggccaatcaggcaaagaactggctgccaggaccctgttaccgccagcagcgagtatcaaagacatctgcggataacaacaacagtgaatactcgtggactggagctaccaagtaccacctcaatggcagagactctctggtgaatccgggcccggccatggcaagccacaaggacgatgaagaaaagtttttttcctcagagcggggttctcatctttgggaagcaaggctcagagaaaacaaatgtggacattgaaaaggtcatgattacagacgaagaggaaatcaggacaaccaatcccgtggctacggagcagtatggttctgtatctaccaacctccagagaggcaacagacaagcagctaccgcagatgtcaacacacaaggcgttcttccaggcatggtctggcaggacagagatgtgtaccttcaggggcccatctgggcaaagattccacacacggacggacattttcacccctctcccctcatgggtggattcggacttaaacaccctccgcctcagatcctgatcaagaacacgcctgtacctgcggatcctccgaccaccttcaaccagtcaaagctgaactctttcatcacccagtattctactggccaagtcagcgtggagatcgagtgggagctgcagaaggaaaacagcaagcgctggaaccccgagatccagtacacctccaactactacaaatctacaagtgtggactttgctgttaatacagaaggcgtgtactctgaaccccgccccattggcacccgttacctcacccgtaatctgtaa

SEQ ID NO: 168 - protein, 737 aa, Artificial Sequence
  source: /note="Description of Artificial Sequence: Synthetic polypeptide"
MAADGYLPDWLEDTLSEGIRQWWKLKPGPPPPKPAERHKDDSRGLVLPGYKYLGPFNGLDKGEPVNEADAAALEHDKAYDRQLDSGDNPYLKYNHADAEFQERLKEDTSFGGNLGRAVFQAKKRLLEPLGLVEEAAKTAPGKKRPVEHSPVEPDSSSGTGKAGQQPARKRLNFGQTGDADSVPDPQPIGEPPAAPSGVGSLTMAAGGGAPMADNNEGADGVGNSSGNWHCDSTWMGDRVITTSTRTWALPTYNNHLYKQISNSTSGGSSNDNAYFGYSTPWGYFDFNRFHCHFSPRDWQRLINNNWGFRPKRLSFKLFNIQVKEVTQNEGTKTIANNLTSTIQVFTDSEYQLPYVLGSAHQGCLPPFPADVFMIPQYGYLTLNNGSQAVGRSSFYCLEYFPSQMLKTGNNFQFTYTFEDVPFHSSYAHSQSLDRLMNPLIDQYLYYLSRTQTTGGTTNTQTLGFSQGGPNTMANQAKNWLPGPCYRQQRVSKTSADNNNSEYSWTGATKYHLNGRDSLVNPGPAMASHKDDEEKFFPQSGVLIFGKQGSEKTNVDIEKVMITDEEEIRTTNPVATEQYGSVSTNLQRGNRQAATADVNTQGVLPGMVWQDRDVYLQGPIWAKIPHTDGHFHPSPLMGGFGLKHPPPQILIKNTPVPADPPTTFNQSKLNSFITQYSTGQVSVEIEWELQKENSKRWNPEIQYTSNYYKSTSVDFAVNTEGVYSEPRPIGTRYLTRNL

SEQ ID NO: 169 - protein, 737 aa, Artificial Sequence
  source: /note="Description of Artificial Sequence: Synthetic polypeptide"
MAADGYLPDWLEDTLSEGIRQWWKLKPGPPPPKPAERHKDDSRGLVLPGYKYLGPFNGLDKGEPVNEADAAALEHDKAYDRQLDSGDNPYLKYNHADAEFQERLKEDTSFGGNLGRAVFQAKKRLLEPLGLVEEAAKTAPGKKRPVEHSPVEPDSSSGTGKAGQQPARKRLNFGQTGDADSVPDPQPIGEPPAAPSGVGSLTMAAGGGAPMADNNEGADGVGNSSGNWHCDSTWMGDRVITTSTRTWALPTYNNHLYKQISNSTSGGSSNDNAYFGYSTPWGYFDFNRFHCHFSPRDWQRLINNNWGFRPKRLSFKLFNIQVKEVTQNEGTKTIANNLTSTIQVFTDSEYQLPYVLGSAHQGCLPPFPADVFMIPQYGYLTLNNGSQAVGRSSFYCLEYFPSQMLKTGNNFQFTYTFEDVPFHSSYAHSQSLDRLMNPLIDQYLYYLSRTQTTGGTTNTQTLGFSQGGPNTMANQAKNWLPGPCYRQQRVSKTSADNNNSEYSWTGATKYHLNGRDSLVNPGPAMASHKDDEEKFFPQSGVLIFGKQGSEKTNVDIEKVMITDEEEIRTTNPVATEQYGSVSTNLQQGNTQAATADVNTQGVLPGMVWQDRDVYLQGPIWAKIPHTDGHFHPSPLMGGFGLKHPPPQILIKNTPVPADPPTTFNQSKLNSFITQYSTGQVSVEIEWELQKENSKRWNPEIQYTSNYYKSTSVDFAVNTEGVYSEPRPIGTRYLTRNL

SEQ ID NO: 170 - protein, 737 aa, Artificial Sequence
  source: /note="Description of Artificial Sequence: Synthetic polypeptide"
MAADGYLPDWLEDTLSEGIRQWWKLKPGPPPPKPAERHKDDSRGLVLPGYKYLGPFNGLDKGEPVNEADAAALEHDKAYDRQLDSGDNPYLKYNHADAEFQERLKEDTSFGGNLGRAVFQAKKRLLEPLGLVEEAAKTAPGKKRPVEHSPVEPDSSSGTGKAGQQPARKRLNFGQTGDADSVPDPQPIGEPPAAPSGVGSLTMAAGGGAPMADNNEGADGVGNSSGNWHCDSTWMGDRVITTSTRTWALPTYNNHLYKQISNSTSGGSSNDNAYFGYSTPWGYFDFNRFHCHFSPRDWQRLINNNWGFRPKRLSFKLFNIQVKEVTQNEGTKTIANNLTSTIQVFTDSEYQLPYVLGSAHQGCLPPFPADVFMIPQYGYLTLNNGSQAVGRSSFYCLEYFPSQMLRTGNNFQFTYTFEDVPFHSSYAHSQSLDRLMNPLIDQYLYYLSRTQTTGGTTNTQTLGFSQGGPNTMANQAKNWLPGPCYRQQRVSKTSADNNNSEYSWTGATKYHLNGRDSLVNPGPAMASHKDDEEKFFPQSGVLIFGKQGSEKTNVDIEKVMITDEEEIRTTNPVATEQYGSVSTNLQQGNTQAATADVNTQGVLPGMVWQDRDVYLQGPIWAKIPHTDGHFHPSPLMGGFGLKHPPPQILIKNTPVPADPPTTFNQSKLNSFITQYSTGQVSVEIEWELQKENSKRWNPEIQYTSNYYKSTSVDFAVNTEGVYSEPRPIGTRYLTRNL

SEQ ID NO: 171 - protein, 729 aa, Artificial Sequence
  source: /note="Description of Artificial Sequence: Synthetic polypeptide"
MAADGYLPDWLEDNLSEGIREWWDLKPGAPKPKANQQKQDDGRGLVLPGYKYLGPFNGLDKGEPVNAADAAALEHDKAYDQQLKAGDNPYLRYNHADAEFQERLQEDTSFGGNLGRAVFQAKKRVLEPLGLVEEGAKTAPGKKRPIDSPDSSTGIGKKGQQPAKKKLNFGQTGDSESVPDPQPLGEPPAAPSSVGSGTMAAGGGAPTADNNEGADGVGNASGNWHCDSTWLGDRVITTSTRTWALPTYNNHLYKQISSSSSGATNDNHYFGYSTPWGYFDFNRFHCHFSPRDWQRLINNNWGFRPKKLRFKLFNIQVKEVTTNDGVTTIANNLTSTVQVFSDSEYQLPYVLGSAHQGCLPPFPADVFMIPQYGYLTLNNGSQSVGRSSFYCLEYFPSQMLRTGNNFEFSYSFEDVPFHSSYAHSQSLDRLMNPLIDQYLYYLARTQSTTGSTRELQFHQAGPNTMAEQSKNWLPGPCYRQQRLSKNLDFNNNSNFAWTAATKYHLNGRNSLTNPGIPMATNKDDEDQFFPINGVLVFGKTGAANKTTLENVLMTSEEEIKTTNPVATEEYGVVSSNLQSSTAGPQSQTINSQGALPGMVWQNRDVYLQGPIWAKIPHTDGNFHPSPLMGGFGLEHPPPQILIKNTPVPANPPEVFTPAKFASFITQYSTGQVSVEIEWELQKENSKRWNPEIQYTSNYAKSNNVEFAVNPDGVYTEPRPIGTRYLTRNL

SEQ ID NO: 172 - DNA, 3075 bp, Artificial Sequence
  source: /note="Description of Artificial Sequence: Synthetic polynucleotide"
tgagaactttcctttcaacgattgcgtcggacaagatggtgatctggtgggaggaggggaagatgaccgccaaggtcgtggagtcggccaaagccattcttggaggaagcaaggtgcgtgtggaccagaaatgcaagtcctcggcccagatagacccgactcccgtgatcgtcacctccaacaccaacatgtgcgccgtgattgacgggaactcaacgaccttcgagcaccagcagccgttgcaagaccggatgttcaaatttgaacttacccgccgtctggatcatgactttggaaaggtcaccaagcaggaagtgaaagactttttccggtgggcaaaggatcacgtggttgaggtggagcatgaattctacgtcaaaaagggtggagctaagaaaagacccgcccccagtgacgcagatataagtgagcccaaacgggcgcgcgagtcagttgcgcagccatcaacgtcagacgcggaagcttcgatcaactacgcggacaggtaccaaaaacaaatgttctcgtcacgtgggcatgaatctgatgctgtttccctgcagacaatgcgagagaatgaatcagaattcaaatatctgcttcactcacggacagaaagactgtttagagtgctttcccgtgtcagaatctcaacccgtttctgtcgtcaaaaaggcgtatcagaaactgtgctacattcatcatatcatgggaaaggtgccagacgcttgcactgcctgcgatctggtcaatgtggatttggatgactgcatctctgaacaataaatgatttaaatcaggtatggctgccgatggttatcctccagattggctcgaggacactctctctgaagggataagacagtggtggaagctcaaacctggcccaccaccaccaaagcccgcagagcggcataaggacgacagcaggggtcttgtgcttcctgggtacaagtacctcggacccttcaacggactcgacaagggggagccggtcaacgaggcagacgccgcggccctcgagcacgacaaggcctacgaccggcagctcgacagcggagacaacccgtacctcaagtacaaccacgccgacgcagagtttcaggagcgccttaaagaagatacgtcttttgggggcaacctcggacgagcagtcttccaggcgaaaaagagggttcttgaacctctgggcctggttgaggaacctgttaagacggctccgggaaaaaagaggccggtagagcactctcctgtggagccagactcctcctcgggaaccggaaaagcgggccagcggcctgcaagaaaaagattaaattttggtcagactggagacgcagactccgtacctgacccccagcctctcggacagccaccagcagccccctctggtctgggatctactacaatggctacaggcagtggcgcaccaatggcagacaataacgagggtgccgatggagtgggtaattcctcaggaaattggcattgcgattcccaatggctgggcgacagagtcatcaccaccagcacccgaacctgggccctgcccacatacaacaaccacctctacaagcaaatctccagccaatcaggagccagcaacgacaaccactactttggctacagcaccccctgggggtattttgacttcaacagattccactgccacttttcaccacgtgactggcaaagactcatcaacaacaactggggattccggcccaaaagactcaacttcaagctctttaatattcaagtcaaagaggtcacgcagaatgacggtacgacgacgattgccaataaccttaccagcacggttcaggtgtttactgactcggagtaccagctcccgtacgtcctgggctcggcgcatcaaggatgcctcccgccgtttccagcggacgtcttcatggtcccacagtatggatacctcaccctgaacaacgggagtcaggcggtaggacgctcttccttttactgcctggagtactttccttctcagatgctgcgtactggaaacaactttcagttcagctacacttttgaagacgtgcctttccacagcagctacgctcacagccagagtctggatcggctgatgaatcctctgatcgaccagtacctgtattatctgaacaagacacaaacaaatagtggaactcttcagcagtctcggctactgtttagccaagctggaccaaccaacatgtctcttcaagctaaaaactggctgcctggaccttgctacagacagcagcgtctgtcaaaacaggcaaacgacaacaacaacagcaactttccctggactgcagctacaaagtatcatctaaatggccgggactcgttggttaatccaggaccagctatggccagtcacaaggatgacgaagaaaagtttttccccatgcatggaaccctgatatttggtaaacaaggaacaaatgccaacgacgcggatttggaaaatgtcatgattacagatgaagaagaaatcagggccaccaatcccgtggctacggagcagtacgggactgtgtcaaataatttgcaaaactcaaacactggtccaactactggaactgtcaatcgccaaggagcgttacctggtatggtgtggcaggatcgagacgtgtacctgcagggacccatttgggccaagattcctcacaccgatggacactttcatccttctccactgatgggaggttttggactcaaacacccgcctcctcagatcatgatcaaaaacactcccgttccagccaatcctcccacaaacttcagttctgccaagtttgcttctttcatcacacagtattccacgggacaggtcagcgtggagatcgagtgggagctgcagaaggagaacagcaaacgctggaatcccgaaattcagtacacttccaactacaacaagtctgttaatgtggactttactgtggacactaatggtgtgtattcagagcctcgccccattggcaccagatacctgactcgtaatctgtaattgcttgttaatcaataaaccgtttaattcgtttcagttgaactttggtctctgcgaagggcgaa

SEQ ID NO: 173 - DNA, 3142 bp, Artificial Sequence
  source: /note="Description of Artificial Sequence: Synthetic polynucleotide"
aaaacgacgggccagtgattgtaatacgactcactatagggcgaaattgaaattagcggccgcgaattcgcctttcgcagagaccaaagttcaactgaaacgaattaaacggtttattgattaacaagcaattacagattacgagtcaggtatctggtgccaatggggcgaggctctgaatacacaccattagtgtccacagtaaagtccacattaacagacttgttgtagttggaagtgtactgaatttcgggattccagcgtttgctgttctccttctgcagctcccactcgatctccacgctgacctgtcccgtggaatactgtgtgatgaaagaagcaaacttggcagaactgaagtttgtgggaggattggctggaacgggagtgtttttgatcatgatctgaggaggcgggtgtttgagtccaaaacctcccatcagtggagaaggatgaaagtgtccatcggtgtgaggaatcttggcccaaatgggtccctgcaggtacacgtctcgatcctgccacaccataccaggtaacgctccttggtgattgacagttccagtagttggaccagtgtttgagttttgcaaattatttgacacagtcccgtactgctccgtagccacgggattggtggccctgatttcttcttcatctgtaatcatgacattttccaaatccgcgtcgttggcatttgttccttgtttaccaaatatcagggttccatgcatggggaaaaacttttcttcgtcatccttgtgactggccatagctggtcctggattaaccaacgagtcccggccatttagatgatactttgtagctgcagtccagggaaagttgctgttgttgttgtcgtttgcctgttttgacagacgctgctgtctgtagcaaggtccaggcagccagtttttagcttgaagagacatgttggttggtccagcttggctaaacagtagccgagactgctgaagagttccactatttgtttgtgtcttgttcagataatacaggtactggtcgatcagaggattcatcagccgatccagactctggctgtgagcgtagctgctgtggaaaggcacgtcttcaaaagtgtagctgaactgaaagttgtttccagtacgcagcatctgagaaggaaagtactccaggcagtaaaaggaagagcgtcctaccgcctgactcccgttgttcagggtgaggtatccatactgtgggaccatgaagacgtccgctggaaacggcgggaggcatccttgatgcgccgagcccaggacgtacgggagctggtactccgagtcagtaaacacctgaaccgtgctggtaaggttattggcaatcgtcgtcgtaccgtcattctgcgtgacctctttgacttgaatattaaagagcttgaagttgagtcttttgggccggaatccccggttgttgttgacgagtctttgccagtcacgtggtgaaaagtggcagtggaatctgttgaagtcaaaatacccccagggggtgctgtagccaaagtagtggttgtcgttgctggctcctgattggctggagatttgcttgtagaggtggttgttgtatgtgggcagggcccaggttcgggtgctggtggtgatgactctgtcgcccagccattgggaatcgcaatgccaatttcctgaggaattacccactccatcggcaccctcgttattgtctgccattggtgcgccactgcctgtagccattgtagtagatcccagaccagagggggctgctggtggctgtccgagaggctgggggtcaggtacggagtctgcgtctccagtctgaccaaaatttaatctttttcttgcaggctgctggcccgcttttccggttcccgaggaggagtctggctccacaggagagtgctctaccggcctcttttttcccggagccgtcttaacaggctcctcaaccaggcccagaggttcaagaaccctctttttcgcctggaagactgctcgtccgaggttgcccccaaaagacgtatcttctttaaggcgctcctgaaactctgcgtcggcgtggttgtacttgaggtacgggttgtctccgctgtcgagctgccggtcgtaggccttgtcgtgctcgagggccgcggcgtctgcctcgttgaccggctcccccttgtcgagtccgttgaagggtccgaggtacttgtacccaggaagcacaagacccctgctgtcgtccttatgccgctctgcgggctttggtggtggtgggccaggtttgagcttccaccactgtcttattccttcagagagagtgtcctcgagccaatctggaagataaccatcggcagccatacctgatttaaatcatttattgttcagagatgcagtcatccaaatccacattgaccagatcgcaggcagtgcaagcgtctggcacctttcccatgatatgatgaatgtagcacagtttctgatacgcctttttgacgacagaaacgggttgagattctgacacgggaaagcactctaaacagtctttctgtccgtgagtgaagcagatatttgaattctgattcattctctcgcattgtctgcagggaaacagcatcagattcatgcccacgtgacgagaacatttgttttggtacctgtccgcgtagttgatcgaagcttccgcgtctgacgtcgatggctgcgcaactgactcgcgcgcccgtttgggctcacttatatctgcgtcactgggggcgggtcttttcttagctccaccctttttgacgtagaattcatgctccacctcaaccacgtgatcctttgcccaccggaaaaagtctttcacttcctgcttggtgacctttccaaagtcatgatccagacggcgggtaagttcaaatttgaacatccggtcttgcaacggctgctggtgctcgaaggtcgttgagttcccgtcaatcacggcgcacatgttggtgttggaggtgacgatcacgggagtcgggtctatctgggccgaggacttgcatttctggtccacacgcaccttgcttcctccaagaatggctttggccgactccacgaccttggcggtcatcttcccctcctcccaccagatcaccatcttgtcgacgcaatggtaaaaggaaagttctcattgg

SEQ ID NO: 174 - protein, 735 aa, Adeno-associated virus 2
MAADGYLPDWLEDTLSEGIRQWWKLKPGPPPPKPAERHKDDSRGLVLPGYKYLGPFNGLDKGEPVNEADAAALEHDKAYDRQLDSGDNPYLKYNHADAEFQERLKEDTSFGGNLGRAVFQAKKRVLEPLGLVEEPVKTAPGKKRPVEHSPVEPDSSSGTGKAGQQPARKRLNFGQTGDADSVPDPQPLGEPPATPAAVGPTTMASGGGAPMADNNEGADGVGNASGNWHCDSTWLGDRVITTSTRTWALPTYNNHLYKQISSASTGASNDNHYFGYSTPWGYFDFNRFHCHFSPRDWQRLINNNWGFRPKRLNFKLFNIQVKEVTQNDGTTTIANNLTSTVQVFTDSEYQLPYVLGSAHQGCLPPFPADVFMIPQYGYLTLNNGSQAVGRSSFYCLEYFPSQMLRTGNNFTFSYTFEDVPFHSSYAHSQSLDRLMNPLIDQYLYYLNRTQNQSGSAQDKALLFSRGSPAGMSVQPKNWLPGPCYRQQRVSKTKTDNNNSNFTWTGASKYNLNGRESIINPGTAMASHKDDKDKFFPMSGVMIFGKESAGASNTALDNVMITDEEEIKATNPVATERFGTVAVNFQSSSTDPATGDVHVMGALPGMVWQDRDVYLQGPIWAKIPHTDGHFHPSPLMGGFGLKHPPPQILIKNTPVPANPPAEFSATKFASFITQYSTGQVSVEIEWELQKENSKRWNPEVQYTSNYAKSANVDFTVDNNGLYTEPRPIGTRYLTRP

SEQ ID NO: 175 - protein, 740 aa, Adeno-associated virus 2
MAADGYLPDWLEDTLSEGIRQWWKLKPGPPPPKPAERHKDDSRGLVLPGYKYLGPFNGLDKGEPVNAADAAALEHDKAYDRQLDSGDNPYLKYNHADAEFQERLKEDTSFGGNLGRAVFQAKKRVLEPLGLVEEPVKTAPGKKRPVEHSPVEPDSSSGTGKAGQQPARKRLNFGQTGDADSVPDPQPLGQPPAAPSGLGTNTMATGSGAPMADNNEGADGVGNSSGNWHCDSTWMGDRVITTSTRTWALPTYNNHLYKQISSQSGASNDNHYFGYSTPWGYFDFNRFHCHFSPRDWQRLINNNWGFRPKRLNFKLFNIQVKEVTQNDGTTTIANNLTSTVQVFTDSEYQLPYVLGSAHQGCLPPFPADVFMVPQYGYLTLNNGSQAVGRSSFYCLEYFPSQMLRTGNNFTFSYTFEDVPFHSSYAHSQSLDRLMNPLIDQYLYYLSRTNTPSGTTTQSGLQFSQAGASDIRDQSRNWLPGPCYRQQRVSKTSADNNNSEYSWTGATKYHLNGRDSLVNPGPAMASHKDDEEKFFPQSGVLIFGKQGSEKTNVDIEKVMITDEEEIRTTNPVATEQYGSVSTNLQRGNRQAATADVNTQGVLPGMVWQDRDVYLQGPIWAKIPHTDGHFHPSPLMGGFGLKHPPPQILIKNTPVPANPSTTFSAAKFASFITQYSTGQVSVEIEWELQKENSKRWNPEIQYTSNYNKSVNVDFTVDTNGVYSEPRPIGTRYLTRNLLLAAA

SEQ ID NO: 176 - protein, 734 aa, Adeno-associated virus 2
MAADGYLPDWLEDTLSEGIRQWWKLKPGPPPPKPAERHKDDSRGLVLPGYKYLGPFNGLDKGEPVNEADAAALEHDKAYDRQLDSGDNPYLKYNHADAEFQERLKEDTSFGGNLGRAVFQAKKRVLEPLGLVEEPVKTAPGKKRPVEHSPVEPDSSSGTGKAGQQPARKRLNFGQTGDADSVPDPQPLGQPPAAPSGLGTNTMATGSGAPMADNNEGADGVGNSSGNWHCDSTWMGDRVITTSTRTWALPTYNNHLYKQISSQSGASNDNHYFGYSTPWGYFDFNRFHCHFSPRDWQRLINNNWGFRPKRLNFKLFNIQVKEVTQNDGTTTIANNLTSTVQVFTDSEYQLPYVLGSAHQGCLPPFPADVFMVPQYGYLTLNNGSQAVGRSSFYCLEYFPSQMLRTGNNFTFSYTFEDVPFHSSYAHSQSLDRLMNPLIDQYLYYLSRTNTPSGTTTQSGLQFSQAGASDIRDQSRNWLPGPCYRQQRVSKTSADNNNSEYSWTGATMYHLNGRDSLVNPGPAMASHKDDEEKFFPQSGVLIFGKQGSEKTNVDIEKVMITDEEEIRTTNPVATEQYGSVSTNLQRGNRQAATADVNTQGVLPGMVWQDRDVYLQGPIWAKIPHTDGHFHPSPLMGGFGLKHPPPQILIKNTPVPANPSTTFSAAKFASFITQYSTGQVSVEIEWELQKENSKRWNPEIQYTSNYNKSINVDFTVDTNGVYSEPRPIGTRYLTRN

SEQ ID NO: 177 - protein, 734 aa, Adeno-associated virus 2
MAADGYLPDWLEDTLSEGIRQWWKLKPGPPPPKPAERHKDDSRGLVLPGYKYLGPFNGLDKGEPVNEADAAALEHDKAYDRQLDSGDNPYLKYNHADAEFQERLKEDTSFGGNLGRAVFQAKKRVLEPLGLVEEPVKTAPGKKRPVEHSPVEPDSSSGTGKAGQQPARKRLNFGQTGDADSVPDPQPLGQPPAAPSGLGTNTMATGSGAPMADNNEGADGVGNSSGNWHCDSTWMGDRVITTSTRTWALPTYNNHLYKQISSQSGASNDNHYFGYSTPWGYFDFNRFHCHFSPRDWQRLINNNWGFRPKRLNFKLFNIQVKEVTQNDGTTTIANNLTSTVQVFTDSEYQLPYVLGSAHQGCLPPFPADVFMVPQYGYLTLNNGSQAVGRSSFYCLEYFPSQMLRTGNNFTFSYTFEDVPFHSSYAHSQSLDRLMNPLIDQYLYYLSRTNTPSGTTTQSGLQFSQAGASDIRDQSRNWLPGPCYRQQRVSKTSADNNNSEYSWTGATKYHLNGRDSLVNPGPAMASHKDDEEKFFPQSGVLIFGKQGSEKTNVDIEKVMITDEEEIRTTNPVATEQYGSVSTNLQRGNRQAATADVNTQGVLPGMVWQDRDVYLQGPIWAKIPHTDGHFHPSPLMGGFGLKHPPPQILIKNTPVPANPSTTFSEAKFASFITQYSTGQVSVEIEWELQKENSKRWNPEIQYTSNYNKSVNVDFTVDTNGVYSEPRPIGTRYLTRN

SEQ ID NO: 178 - protein, 739 aa, Adeno-associated virus 2
MAADGYLPDWLEDTLSEGIRQWWKLKPGPPPPKPAERHKDDSRGLVLPGYKYLGPFNGLDKGEPVNEADAAALEHDKAYDRQLDSGDNPYLKYNHADAEFQERLKEDTSFGGNLGRAVFQAKKRVLEPLGLVEEPVKTAPGKKRPVEHSPVEPDSSSGTGKAGQQPARKRLNFGQTGDADSVPDPQPLGQPPAAPSGLGTNTMATGSGAPMADNNEGADGVGNSSGNWHCDSTWMGDRVITTSTRTWALPTYNNHLYKQISSQSGASNDNHYFGYSTPWGYFDFNRFHCHFSPRDWQRLINNNWGFRPKRLNFKLFNIQVKEVTQNDGTTTIANNLTSTVQVFTDSEYQLPYVLGSAHQGCLPPFPADVFMVPQYGYLTLNNGSQAVGRSSFYCLEYFPSQMLRTGNNFTFSYTFEDVPFHSSYAHSQSLDRLMNPLIDQYLYYLSRTNTPSGTTTQSGLQFSQAGASDIRDQSRNWLPGPCYRQQRVSKTSADNNNSEYSWTGATKYHLNGRDSLVNPGPAMASHKDDEEKFFPQSGVLIFGKQGSEKTNVDIEKVMITDEEEIRTTNPVATEQYGSVSTNLQRGNRQAATADVNTQGVLPGMVWQDRDVYLQGPIWAKIPHTDGHFHPSPLMGGFGLKHPPPQILIKNTPVPANPSTTFSAAKFASFITQYSTGQVSVEIEWELQKENSKRWNPEIQYTSNYNKSVNVDFTVDTNGVYSEPRPIGTRYLTRNLLLAA

SEQ ID NO: 179 - protein, 725 aa, Adeno-associated virus 2
MAADGYLPDWLEDTLSEGIRQWWKLKPGPPPPKPAERHKDDSRGLVLPGYKYLGPFNGLDKGEPVNEADAAALEHDKAYDRQLDSGDNPYLKYNHADAEFQERLKEDTSFGGNLGRAVFQAKKRVLEPLGLVEEPVKTAPGKKRPVEHSPVEPDSSSGTGKAGQQPARKRLNFGQTGDADSVPDPQPLGQPPAAPSGLGTNTMATGSGAPMADNNEGADGVGNSSGNWHCDSTWMGDRVITTSTRTWALPTYNNHLYKQISSQSGASNDNHYFGYSTPWGYFDFNRFHCHFSPRDWQRLINNNWGFRPKRLNFKLFNIQVKEVTQNDGTTTIANNLTSTVQVFTDSEYQLPYVLGSAHQGCLPPFPADVFMVPQYGYLTLNNGSQAVGRSSFYCLEYFPSQMLRTGNNFTFSYTFEDVPFHSSYAHSQSLDRLMNPLIDQYLYYLSRTNTPSGTTTQSGLQFSQAGASDIRDQSRNWLPGPCYRQQRVSKTSADNNNSEYSWTGATKYHLNGRDSLVNPGPAMASHKDDEEKFFPQSGVLIFGKQGSEKTNVDIEKVMITDEEEIRTTNPVATEQYGSVSTNLQRGNRQAATADVNTQGVLPGMVWQDRDVYLQGPIWAKIPHTDGHFHPSPLMGGFGLKHPPPQILIKNTPVPANPSTTFSAAKFASFITQYSTGQVSVEIEWELQKENSKRWNPEIQYTSNYNKSVNVDFTVDTNGVYSEPRP

SEQ ID NO: 180 - protein, 707 aa, Adeno-associated virus 2
MAADGYLPDWLEDTLSEGIRQWWKLKPGPPPPKPAERHKDDSRGLVLPGYKYLGPFNGLDKGEPVNEADAAALEHDKAYDRQLDSGDNPYLKYNHADAEFQERLKEDTSFGGNLGRAVFQAKKRVLEPLGLVEEPVKTAPGKKRPVEHSPVEPDSSSGTGKAGQQPARKRLNFGQTGDADSVPDPQPLGQPPAAPSGLGTNTMATGSGAPMADNNEGADGVGNSSGNWHCDSTWMGDRVITTSTRTWALPTYNNHLYKQISSQSGASNDNHYFGYSTPWGYFDFNRFHCHFSPRDWQRLINNNWGFRPKRLNFKLFNIQVKEVTQNDGTTTIANNLTSTVQVFTDSEYQLPYVLGSAHQGCLPPFPADVFMVPQYGYLTLNNGSQAVGRSSFYCLEYFPSQMLRTGNNFTFSYTFEDVPFHSSYAHSQSLDRLMNPLIDQYLYYLSRTNTPSGTTTQSGLQFSQAGASDIRDQSRNWLPGPCYRQQRVSKTSADNNNSEYSWTGATKYHLNGRDSLVNPGPAMASHKDDEEKFFPQSGVLIFGKQGSEKTNVDIEKVMITDEEEIRTTNPVATEQYGSCIYQPPERQQTSSYRRCQHTRRSSRHGLAGQRCVPSGAHLGKDSTHGRTFSPLSPHGWIRTTPSSTDSHQEHPGTCESFDHLQCGKVCFLHHTVLHGTGQRGDRVRAAEGKQQTLESRNSVHFQLQQVC

SEQ ID NO: 181 - protein, 739 aa, Adeno-associated virus 2; identical to SEQ ID NO: 178

SEQ ID NO: 182 - protein, 737 aa, Adeno-associated virus 2
MASDGYLPDWLEDNLSEGIREWWDLKPGAPKPKANQQKQDDGRGLVLPGYKYLGPFNGLDKGEPVNAADAAALEHDKAYDQQLKAGDNPYLRYNHADAEFQERLQEDTSFGGNLGRAVFQAKKRVLEPFGLVEEGAKTAPGKKRPVEQSPQEPDSSSGIGKTGQQPAKKRLNFGQTGDSESVPDPQPLGEPPATPAAVGPTTMASGGGAPMADNNEGADGVGNASGNWHCDSTWLGDRVITTSTRTWALPTYNNHLYKQISSASTGASNDNHYFGYSTPWGYFDFNRFHCHFSPRDWQRLINNNWGFRPKRLNFKLFNIQVKEVTTNDGTTTIANNLTSTVQVFTDSEYQLPYVLGSAHQGCLPPFPADVFMVPQYGYLTLNNGSQAVGRSSFYCLEYFPSQMLRTGNNFTFSYTFEDVPFHSSYAHSQSLDRLMNPLIDQYLYYLSRTNTPSGTTTQSGLQFSQAGASDIRDQSRNWLPGPCYRQQRVSKTSADNNNSEYSWTGATKYHLNGRDSLVNPGPAMASHKDDEEKFFPQSGVLIFGKQGSEKTNVDIEKVMITDEEEIRTTNPVATEQYGSVSTNLQRGNRQAATADVNTQGVLPGMVWQDRDVYLQGPIWAKIPHTDGHFHPSPLMGGFGLKHHPPQILIKNTPVPANPSTTFSAAKFASFITQYSTGQVSVEIEWELQKENSKRWNPEIQYTSNYNKSVNVDFTVDTNGVYSEPRPIGTRYLTRNLL

SEQ ID NO: 183 - protein, 741 aa, Adeno-associated virus 2
MAADGYLPDWLEDTLSEGIREWWALKPGAPKPKANQQKQDDGRGLVLPGYKYLGPFNGLDKGEPVNEADAAALEHDKAYDQQLQAGDNPYLRYNHADAEFQERLQEDTSFGGNLGRAVFQAKKRVLEPLGLVEEPVKTAPGKKRPVEHSPVEPDSSSGTGKSGQQPARKRLNFGQTGDADSVPDPQPLGQPPAAPSGLGTNTMATGSGAPMADNNEGADGVGNSSGNWHCDSTWMGDRVITTSTRTWALPTYNNHLYKQISSQSGASNDNHYFGYSTPWGYFDFNRFHCHFSPRDWQRLINNNWGFRPKRLNFKLFNIQVKEVTQNDGTTTIANNLTSTVQVFTDSEYQLPYVLGSAHQGCLPPFPADVFMVPQYGYLTLNNGSQAVGRSSFYCLEYFPSQMLRTGNNFTFSYTFEDVPFHSSYAHSQSLDRLMNPLIDQYLYYLSRTNTPSGTTTQSGLQFSQAGASDIRDQSRNWLPGPCYRQQRVSKTSADNNNSEYSWTGATKYHLNGRDSLVNPGPAMASHKDDEEKFFPQSGVLIFGKQGSEKTNVDIEKVMITDEEEIRTTNPVATEQYGSVSTNLQRGNLANHNNTTNARQAATADVNTQGVLPGMVWQDRDVYLQGPIWAKIPHTDGHFHPSPLMGGFGLKHPPPQILIKNTPVPANPSTTFSAAKFASFITQYSTGQVSVEIEWELQKENSKRWNPEIQYTSNYNKSINVDFTVDTNGVYSEPRPIGTRYL

SEQ ID NO: 184 - protein, 730 aa, Adeno-associated virus 2
MASDGYLPDWLEDNLSEGIREWWDLKPGAPKPKANQQKQDDGRGLVLPGYKYLGPFNGLDKGEPVNAADAAALEHDKAYDQQLKAGDNPYLRYNHADAEFQERLQEDTSFGGNLGRAVFQAKKRVLEPFGLVEEGAKTAPGKKRPVEQSPQEPDSSSGIGKTGQQPAKKRLNFGQTGDSESVPDPQPLGEPPATPAAVGPTTMASGGGAPMADNNEGADGVGNASGNWHCDSTWLGDRVITTSTRTWALPTYNNHLYKQISSASTGASNDNHYFGYSTPWGYFDFNRFHCHFSPRDWQRLINNNWGFRPKRLNFKLFNIQVKEVTTNDGVTTIANNLTSTVQVFSDSEYQLPYVLGSAHQGCLPPFPADVFMIPQYGYLTLNNGSQAVGRSSFYCLEYFPSQMLRTGNNFTFSYTFEDVPFHSSYAHSQSLDRLMNPLIDQYLYYLNRTQNQSGSAQNNDLLFSRGSPAGMSVQPKNWLPGPCYRQQRVSKTKTDNNNSNFTWTGASKYNLNGRESIINPGTAMASHKDDKDKFFPMSGVMIFGKESAGASNTALDNVMITDEEEIKATNPVATERFGTVAVNLQSSSTDPATGDVHVMGALPGMVWQDRDVYLQGPIWAKIPHTDGHFHPSPLMGGFGLKNPPPQILIKNTPVPANPPAEFSATKFASFITQYSTGQVSVEIEWELQKENSKRWNPEVQYTSNYAKSANVDFTVDNNGLYTEPRPIGTR

SEQ ID NO: 185 - protein, 735 aa, Adeno-associated virus 2
  MOD_RES (239)..(239): Any amino acid
MASDGYLPDWLEDNLSEGIREWWDLKPGAPKPKANQQKQDDGRGLVLPGYKYLGPFNGLDKGEPVNAADAAALEHDKAYDQQLKAGDNPYLRYNHADAEFQERLQEDTSFGGNLGRAVFQAKKRVLEPFGLVEEGAKTAPGKKRPVEQSPQEPDSSSGIGKTGQQPAKKRLNFGQTGDSESVPDPQPLGEPPATPAAVGPTTMASGGGAPMADNNEGADGVGNASGNWHCDSTWLGDRXITTSTRTWALPTYNNHLYKQISSASTGASNDNHYFGYSTPWGYFDFNRFHCHFSPRDWQRLINNNWGFRPKRLNFKLFNIQVKEVTTNDGVTTIANNLTSTVQVFSDSEYQLPYVLGSAHQGCLPPFPADVFMIPQYGYLTLNNGSQAVGRSSFYCLEYFPSQMLRTGNNFTFSYTFEDVPFHSSYAHSQSLDRLMNPLIDQYLYYLNRTQNQSGSAQNNDLLFSRGSPAGMSVQPKNWLPGPCYRQQRVSKTKTDNNNSNFTWTGASKYNLNGRESIINPGTAMASHKDDKDKFFPMSGVMIFGKESAGASNTALDNVMITDEEEIKATNPVATERFGTVAVNLQSSSTDPATGDVHVMGALPGMVWQDRDVYLQGPIWAKIPHTDGHFHPSPLMGGFGLKNPPPQILIKNTPVPANPPAEFSATKFASFITQYSTGQVSVEIEWELQKENSKRWNPEVQYTSNYAKSANVDFTVDNNGLYTEPRPIGTRYLTRP

SEQ ID NO: 186 - protein, 733 aa, Adeno-associated virus 2
MASDGYLPDWLEDNLSEGIREWWDLKPGAPKPKANQQKQDDGRGLVLPGYKYLGPFNGLDKGEPVNAADAAALEHDKAYDQQLKAGDNPYLRYNHADAEFQERLQEDTSFGGNLGRAVFLAKKRVLEPFGLVEEGAKTAPGKKRPVEQSPQEPDSSSGIGKTGQQPAKKRLNFGQTGDSESVPDPQPLGEPPATPAAVGPTTMASGGGAPMADNNEGADGVGNASGNWHCDSTWLGDRVITTSTRTWALPTYNNHLYKQISSASTGASNDNHYFGYSTPWGYFDFNRFHCHFSPRDWQRLINNNWGFRPKRLNFKLFNIQVKEVTTNDGVTTIANNLTSTVQVFSDSEYQLPYVLGSAHQGCLPPFPADVFMIPQYGYLTLNNGSQAVGRSSFYCLEYFPSQMLRTGNNFTFSYTFEDVPFHSSYAHSQSLDRLMNPLIDQYLYYLNRTQNQSGSAQNNDLLFSRGSPAGMSVQPKNWLPGPCYRQQRVSKTKTDNNNSNFTWTGASKYNLNGRESIINPGTAMASHKDDKDKFFPMSGVMIFGKESAGASNTALDNVMITDEEEIKATNPVATERFGTVAVNLQSSSTDPATGDVHVMGALPGMVWQDRDVYLQGPIWAKIPHTDGHFHPSPLMGGFGLKNPPPQILIKNTPVPANPPAEFSATKFASFITQYSTGQVSVEIEWELQKENSKRWNPEVQYTSNYAKSANVDFTVDNNGLYTEPRPIGTRYLT

SEQ ID NO: 187 - protein, 734 aa, Adeno-associated virus 2
MAADGYLPDWLEDTLSEGIRQWWKLKPGPPPPKPAERHKDDSRGLVLPGCKYLGPFNGLDKGEPVNEADAAALEHDKAYDRQLDSGDNPYLKYNHADAEFQERLKEDTSFGGNLGRAVFQAKKRVLEPLGLVEEPVKTAPGKKRPVEHSPVEPDSSSGTGKAGQQPARKRLNFGQTGDADSVPDPQPLGQPPAAPSGLGTNTMATGSGAPMADNNEGADGVGNSSGNWHCDSTWMGDRVITTSTRTWALPTYNNHLYKQISSQSGASNDNHYFGYSTPWGYFDFNRFHCHFSPRDWQRLINNNWGFRPKRLNFKLFNIQVKEVTQNDGTTTIANNLTSTVQVFSDSEYQLPYVLGSAHQGCLPPFPADVFMIPQYGYLTLNNGSQAVGRSSFYCLEYFPSQMLRTGNNFTFNYTFEDVPFHSSYAHSQSLDRLMNPLIDQYLYYLNRTQNQSGSAQNNDLLFSRGSPAGMSVQPKNWLPGPCYRQQRVSKTKTDNNNSNFTWTGASKYNLNGRESIINPGTAMASHKDDKDKFFPMSGVMIFGKESAGASNTALDNVMITDEEEIKATNPVATERFGTVAVNLQSSSTDPATGDVHVMGALPGMVWQDRDVYLQGPIWAKIPHTDGHFHPSPLMGGFGLKNPPPQILIKNTPVPANPPAEFSATKFASFITQYSTGQVSVEIEWELQKENSKRWNPEVQYTSNYAKSANVDFTVDNNGLYTEPRPIGTRYLTRP

SEQ ID NO: 188 - protein, 734 aa, Adeno-associated virus 2
MAADGYLPDWLEDTLSEGIRQWWKLKPGPPPPKPAERHKDDSRGLVLPGYKYLGPFNGLDKGEPVNEADAAALEHDKAYDRQLDSGDNPYLKYNHADAEFQERLKEDTSFGGNLGRAVFQAKKRVLEPLGLVEEPVKTAPGKKRPVEHSPVEPDSSSGTGKAGQQPARKRLNFGQTGDADSVPDPQPLGQPPAAPSGLGTNTMATGSGAPMADNNEGADGVGNSSGNWHCDSTWMGDRVITTSTRTWALSTYNNHLYKQISSQSGASNDNHYFGYSTPWGYFDFNRFHCHFSPRDWQRLINNNWGFRPKRLNFKLFNIQVKEVTQNDGTTTIANNLTSTVQVFTDSEYQLPYVLGSAHQGCLPPFPADVFMVPQYGYLTLNNGSQAVGRSSFYCLEYFPSQMLRTGNNFTFSYTFEDVPFHSSYAHSQSLDRLMNPLIDQYLYYLSRTNTPSGTTTQSRLQFSQAGASDIRDQSRNWLPGPCYRQQRVSKTSADNNNSEYSWTGATKYHLNGRDSLVNPGPAMASHKDDEEKFFPQSGVLIFGKQGSEKTNVDIEKVMITDEEEIRTTNPVATEQYGSVSTNLQRGNRQAATADVNTQGVLPGMVWQDRDVYLQGPIWAKIPHTDGHFHPSPLMGGFGLKHPPPQILIKNTPVPANPSTTFSAAKFASFITQYSTGQVSVEIEWELQKENSKRWNPEIQYTSNYNKSINVDFTVDTNGVYSEPRPIGTRYLTRN

SEQ ID NO: 189 - protein, 738 aa, Adeno-associated virus 2
MAADGYLPDWLEDTLSEGIRQWWKLKPGPPPPKPAERHKDDSRGLVLPGYKYLGPFNGLDKGEPVNEADAAALEHDKAYDRQLDGGDNPYLKYNHADAEFQERLKEDTSFGGNLGRAVFQAKKRVLEPLGLVEEPVKTAPGKKRPVEHSPVEPDSSSGTGKAGQQPARKRLNFGQTGDADSVPDPQPLGQPPAAPSGLGTNTMATGSGAPMADNNEGADGVGNSSGNWHCDSTWMGDRVITTSTRTWALPTYNNHLYKQISSQSGASNDNHYFGYSTPWGYFDFNRFHCHFSPRDWQRLINNNWGFRPKRLNFKLFNIQVKEVTQNDGTTTIANNLTSTVQVFTDSEYQLPYVLGSAHQGCLPPFPADVFMVPQYGYLTLNNGSQAVGRSSFYCLEYFPSQMLRTGNNFTFSYTFEDVPFHSSYAHSQSLDRLMNPLIDQYLYYLSRTNTPSGTTTQSGLQFSQAGASDIRDQSRNWLPGPCYRQQRVSKTSADNNNSEYSWTGATKYHLNGRDSLVNPGPAMASHKDDEEKFFPQSGVLIFGKQGSEKTNVDIEKVMITDEEEIRTTNPVATEQYGSVSTNLQRGNRQAATADVNTQGVLPGMVWQDRDVYLQGPIWAKIPHTDGHFHPSPLMGGFGLKHPPPQILIKNTPVPANPSTTFSAAKFASFITQYSTGQVSVEIEWELQKENSKRWNPEIQYTSNYNKSVNVDFTVDTNGVYSEPRPIGTRYLTRNLLRP

SEQ ID NO: 190 - DNA, 2208 bp, Artificial Sequence
  source: /note="Description of Artificial Sequence: Synthetic polynucleotide"
atggctgccgatggttatcttccagattggctcgaggacactctctctgaaggaataagacagtggtggaagctcaaacctggcccaccaccaccaaagcccgcagagcggcataaggacgacagcaggggtcttgtgcttcctgggtacaagtacctcggacccttcaacggactcgacaagggggagccggtcaacgaggcagacgccgcggccctcgagcacgacaaggcctacgaccggcagctcgacagcggagacaacccgtacctcaagtacaaccacgccgacgcagagtttcaggagcgccttaaagaagatacgtcttttgggggcaacctcggacgagcagtcttccaggcgaaaaagagggttcttgaacctctgggcctggttgaggaacctgttaagacggctccgggaaaaaagaggccggtagagcactctcctgtggagccagactcctcctcgggaaccggaaaagcgggccagcagcctgcaagaaaaagattaaattttggtcagactggagacgcagactccgtacctgacccccagcctctcggacagccaccagcagccccctctggtctgggatctactacaatggctacaggcagtggcgcaccaatggcagacaataacgagggtgccgatggagtgggtaattcctcaggaaattggcattgcgattcccaatggctgggcgacagagtcatcaccaccagcacccgaacctgggccctgcccacatacaacaaccacctctacaagcaaatctccagccaatcaggagccagcaacgacaaccactactttggctacagcaccccctgggggtattttgacttcaacagattccactgccacttttcaccacgtgactggcaaagactcatcaacaacaactggggattccggcccaaaagactcaacttcaagctctttaatattcaagtcaaagaggtcacgcagaatggcggtacgacgacgattgccaataaccttaccagcacggttcaggtgtttactgactcggagtaccagctcccgtacgtcctgggctcggcgcatcaaggatgcctcccgccgtttccagcggacgtcttcatggtcccacagtatggatacctcaccctgaacaacgggagtcaggcggtaggacgctcttccttttactgcctggagtactttccttctcagatgctgcgtactggaaacaactttcagttcagctacacttttgaagacgtgcctttccacagcagctacgctcacagccagagtctggatcggctgatgaatcctctgatcgaccagtacctgtattatctgaacaagacacaaacaaatagtggaactcttcagcagtctcggctactgtttagccaagctggaccaaccaacatgtctcttcaagctaaaaactggctgcctggaccttgctacagacagcagcgtctgtcaaaacaggcaaacggcaacaacaacagcaactttccctggactgcagctacaaagtatcatctaaatggccgggactcgttggttaatccaggaccagctatggccagtcacaaggatgacgaagaaaagtttttccccatgcatggaaccctgatatttggtaaacaaggaacaaatgccaacgacgcggatttggaaaatgtcatgattacagatgaagaagaaatcagggccaccaatcccgtggctacggagcagtacgggactgtgtcaaataatttgcaaaactcaaacactggtccaactactggaactgtcaatcaccaaggagcgttacctggtatggtgtggcaggatcgagacgtgtacctgcagggacccatttgggccaagattcctcacaccgatggacactttcatccttctccactgacgggaggttttggactcaaacacccgcctcctcagatcatgatcaaaaacactcccgttccagccaatcctcccacaaacttcagttctgccaagtttgcttctttcatcacacagtattccacgggacaggtcagcgtggagatcgagtgggagctgcagaaggagaacagcaaacgctggaatcccgaaattcagtacacttccaactacaacaagtctgttaatgtggactttactgtggacactaatggtgtgtattcagagcctcgccccattggcaccagatacctgactcgtaatctgtaa

SEQ ID NO: 191 - protein, 735 aa, Artificial Sequence
  source: /note="Description of Artificial Sequence: Synthetic polypeptide"
MAADGYLPDWLEDTLSEGIRQWWKLKPGPPPPKPAERHKDDSRGLVLPGYKYLGPFNGLDKGEPVNEADAAALEHDKAYDRQLDSGDNPYLKYNHADAEFQERLKEDTSFGGNLGRAVFQAKKRVLEPLGLVEEPVKTAPGKKRPVEHSPVEPDSSSGTGKAGQQPARKRLNFGQTGDADSVPDPQPLGQPPAAPSGLGSTTMATGSGAPMADNNEGADGVGNSSGNWHCDSQWLGDRVITTSTRTWALPTYNNHLYKQISSQSGASNDNHYFGYSTPWGYFDFNRFHCHFSPRDWQRLINNNWGFRPKRLNFKLFNIQVKEVTQNGGTTTIANNLTSTVQVFTDSEYQLPYVLGSAHQGCLPPFPADVFMVPQYGYLTLNNGSQAVGRSSFYCLEYFPSQMLRTGNNFQFSYTFEDVPFHSSYAHSQSLDRLMNPLIDQYLYYLNKTQTNSGTLQQSRLLFSQAGPTNMSLQAKNWLPGPCYRQQRLSKQANGNNNSNFPWTAATKYHLNGRDSLVNPGPAMASHKDDEEKFFPMHGTLIFGKQGTNANDADLENVMITDEEEIRATNPVATEQYGTVSNNLQNSNTGPTTGTVNHQGALPGMVWQDRDVYLQGPIWAKIPHTDGHFHPSPLTGGFGLKHPPPQIMIKNTPVPANPPTNFSSAKFASFITQYSTGQVSVEIEWELQKENSKRWNPEIQYTSNYNKSVNVDFTVDTNGVYSEPRPIGTRYLTRNL

SEQ ID NO: 192 - DNA, 2208 bp, Artificial Sequence
  source: /note="Description of Artificial Sequence: Synthetic polynucleotide"
atggctgccgatggttatcttccagattggctcgaggacactctctctgaaggaataagacagtggtggaagctcaaacctggcccaccaccaccaaagctcgcagagcggcatcaggacgacagcaggggtcttgtgcttcctgggtacaagtacctcggacccttcaacggactcgacaaaggagagccggtcaacgaggcagacgccgcggccctcgagcacgacaaggcctacgaccggcagctcgacagcggagacaacccgtacctcaagtacaaccacgccgacgcggagtttcaggagcgtcttaaagaagatacgtcttttgggggcaacctcggacgagcagtcttccaggcgaaaaagagggttcttgaacctctgggcctggttgaggaacctgttaagacggctccgggaaaaaagaggccggtagagcactctcctgtggagccagactcctcctcgggaaccggaaaggcgggccatcagcctgcgagaaagagattgaattttggtcagactggagacgcagactccgtacctgacccccagcctctcggacagccaccagcagcccccacaagtctgggatctactacaatggctacaggcagtggcgcaccaatggcagacaataacgagggtgccgatggagtgggtaattcctcaggaaattggcattgcgattcccaatggctgggcgacagagtcatcaccaccagcacccgaacctgggccctgcccacctacaacaaccacctctacaagcaaatctccagccaatcaggagcctcgaacgacaaccactactttggctacagcaccccctgggggtattttgacttcaacagattccactgtcacttctccccacgtgattggcaaagactcatcaacaacaactggggattccgacccaagagactcaacttcaagctctttaacattcaagtcaaagaggtcacgcagaatgacggtacgacgacgattgccaataaccttaccagcacggttcaggtgtttactgactcggagtaccagctcccgtacgtcctcggctcggcgcatcaaggatgcctcccgccgtttccagcggacgtcttcacggtcccacagtatggatacctcaccctgaacaacgggagtcaggcggtaggacgctcttccttttactgcctggagtactttccttctcagatgctgcgtactggaaacaaccttaccttcagctacacctttgaggacgttcctttccacagcagctacgctcacagccagagtttggaccggctgatgaatcctctgatcgaccagtatctatattatctgaacaggacacaatcaaatagtggaactcttcagcagtctaggctactgtttagccaagctggacccaccagcatgtctcttcaagctaaaaactggctgcctggaccttgctacagacagcagcgtctttcaaagcaggcaaacgacaacaacaacagcaactttccctggactgcggctacaaagtatcatctaaatggccgggactcgttggttaatccaggaccagctatggccagccacaaagacgatgaagaaaagtttttccccatgcatggaaccctgatatttggtaaacaaggaacaaatgctaacgacgcggatttggagcatgttatgattacagatgaagaagaaatcaggaccaccaatcctgtggctacagagcagtacggaaacgtgtcaaataatttgcaaaactcaaatactggtccaactacagaaaatgtcaatcaccagggagcgttacctggtatggtgtggcaggatcgagacgtgtacctgcagggacccatttgggccaagattcctcacaccgacggacactttcacccttctccactgatgggaggttttggactcaaacacccgcctcctcaaatcatgatcaaaaacactcccgttccagccaatcctcccacaaactacagttctgccaagtttgcttctttcatcacacagtattccacgggccaggtcagcgtggagattgagtgggagctgcggaaggagaacagcaaacgctggaaccccgagatccagtatacttccaactacaacaaatctgttaatgtggactttactgtggacactaatggtgtgtattcagagcctcgccccattggcaccagatacctgactcgtaatctgtaa

SEQ ID NO: 193 - protein, 735 aa, Artificial Sequence
  source: /note="Description of Artificial Sequence: Synthetic polypeptide"
MAADGYLPDWLEDTLSEGIRQWWKLKPGPPPPKLAERHQDDSRGLVLPGYKYLGPFNGLDKGEPVNEADAAALEHDKAYDRQLDSGDNPYLKYNHADAEFQERLKEDTSFGGNLGRAVFQAKKRVLEPLGLVEEPVKTAPGKKRPVEHSPVEPDSSSGTGKAGHQPARKRLNFGQTGDADSVPDPQPLGQPPAAPTSLGSTTMATGSGAPMADNNEGADGVGNSSGNWHCDSQWLGDRVITTSTRTWALPTYNNHLYKQISSQSGASNDNHYFGYSTPWGYFDFNRFHCHFSPRDWQRLINNNWGFRPKRLNFKLFNIQVKEVTQNDGTTTIANNLTSTVQVFTDSEYQLPYVLGSAHQGCLPPFPADVFTVPQYGYLTLNNGSQAVGRSSFYCLEYFPSQMLRTGNNLTFSYTFEDVPFHSSYAHSQSLDRLMNPLIDQYLYYLNRTQSNSGTLQQSRLLFSQAGPTSMSLQAKNWLPGPCYRQQRLSKQANDNNNSNFPWTAATKYHLNGRDSLVNPGPAMASHKDDEEKFFPMHGTLIFGKQGTNANDADLEHVMITDEEEIRTTNPVATEQYGNVSNNLQNSNTGPTTENVNHQGALPGMVWQDRDVYLQGPIWAKIPHTDGHFHPSPLMGGFGLKHPPPQIMIKNTPVPANPPTNYSSAKFASFITQYSTGQVSVEIEWELRKENSKRWNPEIQYTSNYNKSVNVDFTVDTNGVYSEPRPIGTRYLTRNL

SEQ ID NO: 194 - DNA, 2208 bp, Artificial Sequence
  source: /note="Description of Artificial Sequence: Synthetic polynucleotide"
atggctgccgatggttatcttccagattggctcgaggacactctctctgaaggaataagacagtggtggaagctcaaacctggcccaccaccaccaaagcccgcagagcggcatcaggacgacagcaggggtcttgtgcttcctgggtacaagtacctcggacccttcaacggactcgacaaaggagagccggtcaacgaggcagacgccgcggccctcgagcacgacaaggcctacgaccggcagctcgacagcggagacaacccgtacctcaagtacaaccacgccgacgcggagtttcaggagcgtcttaaagaagatacgtcttttgggggcaacctcggacgagcagtcttccaggcgaaaaagagggttcttgaacctctgggcctggttgaggaacctgttaagacggctccgggaaaaaagaggccggtagagcactctcctgtggagccagactcctcctcgggaaccggaaaagcgggccatcagcctgcgagaaagagattgaattttggtcagactggagacgcagactccgtacctgacccccagcctctcggacagccaccagcagcccccacaagtttgggatctactacaatggctacaggcagtggcgcaccaatggcagacaataacgagggtgccgatggagtgggtaattcctcaggaaattggcattgcgattcccaatggctgggcgacagagtcatcaccaccagcacccgaacctgggccctgcccacctacaacaaccacctctacaagcaaatctccagccaatcaggagcctcgaacgacaaccactactttggctacagcaccccctgggggtattttgacttcaacagattccactgtcacttctccccacgtgattggcaaagactcatcaacaacaactggggattccgacccaagagactcaacttcaagctctttaacattcaagtcaaggaggtcacgcagaatgacggtacgacgacgattgccaataaccttaccagcacggttcaggtgtttactgactcggagtaccagctcccgtacgtcctcggctcggcgcatcaaggatgcctcccgccgtttccagcggacgtcttcatggtcccacagtatggatacctcaccctgaacaacgggagtcaggcggtaggacgctcttccttttactgcctggagtactttccttctcagatgctgcgtactggaaacaactttaccttcagctacacctttgaggacgttcctttccacagcagctacgctcacagccagagtttggaccggctgatgaatcctctgatcgaccagtatctatattatctgaacaggacacaatcaaatagtggaactcttcagcagtctaggctactgtttagccaagctggacccaccagcatgtctcttcaagctaaaaactggctgcctggaccttgctacagacagcagcgtctttcaaagcaggcaaacgacaacaacaacagcaactttccctggactgcggctacaaagtatcgtctaaatggccgggactcgttggttaatccaggaccagctatggccagccacaaagacgatgaagaaaagtttttccccatgcatggaaccctgatatttggtaaacaaggaacaaatgctaacgacgcggatttggagcatgttatgattacagatgaagaagaaatcaggaccaccaatcctgtggctacagagcagtacggaaacgtgtcaaataatttgcaaaactcaaatactggtccaactacagaaaatgtcaatcaccagggagcgttacctggtatggtgtggcaggatcgagacgtgtacctgcagggacccatttgggccaagattcctcacaccgacggacactttcacccttctccactgatgggaggttttggactcaaacacccgcctcctcaaatcatgatcaaaaacactcccgttccagccaatcctcccacaaacttcagttctgccaagtttgcttctttcatcacacagtattccacgggccaggtcagcgtggagattgagtgggagctgcagaaggagaacagcaaacgctggaaccccgagatccagtatacttccaactacaacaaatctgttaatgtggactttactgtggacactaatggtgtgtattcagagcctcgccccattggcaccagatacctgactcgtaatctgtaa

SEQ ID NO: 195 - protein, 735 aa, Artificial Sequence
  source: /note="Description of Artificial Sequence: Synthetic polypeptide"
MAADGYLPDWLEDTLSEGIRQWWKLKPGPPPPKPAERHQDDSRGLVLPGYKYLGPFNGLDKGEPVNEADAAALEHDKAYDRQLDSGDNPYLKYNHADAEFQERLKEDTSFGGNLGRAVFQAKKRVLEPLGLVEEPVKTAPGKKRPVEHSPVEPDSSSGTGKAGHQPARKRLNFGQTGDADSVPDPQPLGQPPAAPTSLGSTTMATGSGAPMADNNEGADGVGNSSGNWHCDSQWLGDRVITTSTRTWALPTYNNHLYKQISSQSGASNDNHYFGYSTPWGYFDFNRFHCHFSPRDWQRLINNNWGFRPKRLNFKLFNIQVKEVTQNDGTTTIANNLTSTVQVFTDSEYQLPYVLGSAHQGCLPPFPADVFMVPQYGYLTLNNGSQAVGRSSFYCLEYFPSQMLRTGNNFTFSYTFEDVPFHSSYAHSQSLDRLMNPLIDQYLYYLNRTQSNSGTLQQSRLLFSQAGPTSMSLQAKNWLPGPCYRQQRLSKQANDNNNSNFPWTAATKYRLNGRDSLVNPGPAMASHKDDEEKFFPMHGTLIFGKQGTNANDADLEHVMITDEEEIRTTNPVATEQYGNVSNNLQNSNTGPTTENVNHQGALPGMVWQDRDVYLQGPIWAKIPHTDGHFHPSPLMGGFGLKHPPPQIMIKNTPVPANPPTNFSSAKFASFITQYSTGQVSVEIEWELQKENSKRWNPEIQYTSNYNKSVNVDFTVDTNGVYSEPRPIGTRYLTRNL

SEQ ID NO: 196 - DNA, 2208 bp, Artificial Sequence
  source: /note="Description of Artificial Sequence: Synthetic polynucleotide"
atggctgccgatggttatcttccagattggctcgaggacactctctctgaaggaataagacagtggtggaagctcaaacctggcccaccaccaccaaagcccgcagagcggcatcaggacgacagcaggggtcttgtgcttcctgggtacaagtacctcggacccttcaacggactcgacaaaggagagccggtcaacgaggcagacgccgcggccctcgagcacgacaaggcctacgaccggcagctcgacagcggagacaacccgtacctcaagtacaaccacgccgacgcggagtttcaggagcgtcttaaagaagatacgtcttttgggggcaacctcggacgagcagtcttccaggcgaaaaagagggttcttgaacctctgggcctggttgaggaacctgttaagacggctccgggaaaaaagaggccggtagagcactctcctgtggagccagactcctcctcgggaaccggaaaagcgggccatcagcctgcgagaaagagattgaattttggtcagactggagacgcagactccgtacctgacccccagcctctcggacagccaccagcagcccccacaagtttgggatctactacaatggctacaggcagtggcgcaccaatggcagacaataacgagggtgccgatggagtgggtaattcctcaggaaattggcattgcgattcccaatggctgggcgacagagtcatcaccaccagcacccgaacctgggccctgcccacctacaacaaccacctctacaagcaaatctccagccaatcaggagcctcgaacgacaaccactactttggctacagcaccccctgggggtattttgacttcaacagattccactgtcacttctccccacgtgattggcaaagactcatcaacaacaactggggattccgacccaagagactcaacttcaagctctttaacattcaagtcaaagaggtcacgcagaatgacggtacgacgacgattgccaataaccttaccagcacggttcaggtgtttactgactcggagtaccagctcccgtacgtcctcggctcggcgcatcaaggatgcctcccgccgtttccagcggacgtcttcatggtcccacagtatggatacctcaccctgaacaacgggagtcaggcggtaggacgcccttccttttactgcctggagtactttccttctcagatgctgcgtactggaaacaactttaccttcagctacacctttgaggacgttcctttccacagcagctacgctcacagccagagtttggaccggctgatgaatcctctgatcgaccagtatctatattatctgaacaggacacaatcaaatagtggaactcttcagcagtctaggctactgtttagccaagctggacccaccagcatgtctcttcaagctaaaaactggctgcctggaccttgctacagacagcagcgtctttcaaagcaggcaaacgacaacaacaacagcaactttccctggactgcggctacaaagtatcatctaaatggccgggactcgttggttaatccaggaccagctatggccagccacaaagacgatgaagaaaagtttttccccatgcatgggaccctgatatttggtaaacaaggaacaaatgctaacgacgcggatttggagcatgttatgattacagatgaagaagaaatcaggaccaccaatcctgtggctacagagcagtacggaaacgtgtcaaataatttgcaaaactcaaatactggtccaactacagaaaatgtcaatcaccagggagcgttacctggtatggtgtggcaggatcgagacgtgtacctgcagggacccatttgggccaagattcctcacaccgacggacactttcacccttctccactgatgggaggttttggactcaaacacccgcctcctcaaatcatgatcaaaaacactcccgttccagccaatcctcccacaaacttcagttctgccaagtttgcttctttcatcacacagtattccacgggccaggtcagcgtggagattgagtgggagctgcagaaggagaacagcaaacgctggaaccccgagatccagtatacttccaactacaacaaatctgttaatgtggactttactgtggacactaatggtgtgtattcagagcctcgccccattggcaccagatacctgactcgtaatctgtaa

SEQ ID NO: 197 - protein, 735 aa, Artificial Sequence
  source: /note="Description of Artificial Sequence: Synthetic polypeptide"
MAADGYLPDWLEDTLSEGIRQWWKLKPGPPPPKPAERHQDDSRGLVLPGYKYLGPFNGLDKGEPVNEADAAALEHDKAYDRQLDSGDNPYLKYNHADAEFQERLKEDTSFGGNLGRAVFQAKKRVLEPLGLVEEPVKTAPGKKRPVEHSPVEPDSSSGTGKAGHQPARKRLNFGQTGDADSVPDPQPLGQPPAAPTSLGSTTMATGSGAPMADNNEGADGVGNSSGNWHCDSQWLGDRVITTSTRTWALPTYNNHLYKQISSQSGASNDNHYFGYSTPWGYFDFNRFHCHFSPRDWQRLINNNWGFRPKRLNFKLFNIQVKEVTQNDGTTTIANNLTSTVQVFTDSEYQLPYVLGSAHQGCLPPFPADVFMVPQYGYLTLNNGSQAVGRPSFYCLEYFPSQMLRTGNNFTFSYTFEDVPFHSSYAHSQSLDRLMNPLIDQYLYYLNRTQSNSGTLQQSRLLFSQAGPTSMSLQAKNWLPGPCYRQQRLSKQANDNNNSNFPWTAATKYHLNGRDSLVNPGPAMASHKDDEEKFFPMHGTLIFGKQGTNANDADLEHVMITDEEEIRTTNPVATEQYGNVSNNLQNSNTGPTTENVNHQGALPGMVWQDRDVYLQGPIWAKIPHTDGHFHPSPLMGGFGLKHPPPQIMIKNTPVPANPPTNFSSAKFASFITQYSTGQVSVEIEWELQKENSKRWNPEIQYTSNYNKSVNVDFTVDTNGVYSEPRPIGTRYLTRNL

SEQ ID NO: 198 - DNA, 2208 bp, Artificial Sequence
  source: /note="Description of Artificial Sequence: Synthetic polynucleotide"
atggctgccgatggttatcttccagattggctcgaggacactctctctgaaggaataagacagtggtggaagctcaaacctggcccaccaccaccaaagcccgcagagcggcataaggacgacagcaggggtcttgtgcttcctgggtacaagtacctcggacccttcaacggactcgacaagggagagccggtcaacgaggcagacgccgcggccctcgagcacgacaaggcctacgaccggcagctcgacagcggagacaacccgtacctcaagtacaaccacgccgacgcggagtttcaggagcgccttaaagaagatacgtcttttgggggcaacctcggacgagcagtcttccaggcaaaaaagagggttcttgaacctctgggcctggttgaggagcctgttaaaacggctccgggaaaaaagaggccggtagagcactctcctgcggagccagactcctcctcgggaaccggaaaagcgggccagcagcctgcaagaaaaagattgaatttcggtcagactggagacgcagactccgtacctgacccccagcctctcggacagccaccagcagccccctctggtctgggaactaatacgatggcttcaggcagtggcgcaccaatggcagacaataacgagggcgccgacggagtgggtaattcctcgggaaattggcattgcgattccacatggatgggcgacagagtcatcaccaccagcacccgaacttgggccctgcccacctacaacaaccatctctacaagcaaatctccagccaatcaggagccagcaacgacaaccactactttggctacagcaccccttgggggtattttgacttcaacagattccactgccacttttcaccacgtgactggcaaagactcatcaacaacaactggggattccggcccaagagactcaacttcaagctctttaacattcaagtcaaagaggtcacgcagaatgacggtacgacgacgattgccaataaccttaccagcacggttcaggtgtttactgactcggagtaccagctcccgtacgtcctcggctcggcgcatcaaggatgcctcccgccgttcccagcagacgtcttcatggtgccacagtatggatacctcaccctgaacaacgggagtcaggcagtaggacgctcttcattttactgcctggagtactttccttctcagatgctgcgtaccggaaacaactttaccttcagctacacctttgaggacgttcctttccacagcagctacgctcacagccagagtttggaccgtctcatgaatcctctcatcgaccagtacctgtattacttgagcagaacaaacactccaagcggaaccaccacgcagtccaggcttcagttttctcaggccggagcaagtgacattcgggaccagtctaggaactggcttcctggaccctgttaccgccagcagcgagtatcaaagacatctgcggataacaacaacagtgaatactcgtggactggagctaccaagtaccacctcaatggcagagactctctggtgaatccgggcccggccatggccagccacaaggacgatgaagaaaagttttttcctcagagcggggttctcatctttgggaagcaaggctcagagaaaacaaatgtggacattgaaaaggtcatgattacagacgaagaggaaatcaggaccaccaatcccgtggctacggagcagtatggttctgtatctaccaacctgcagggcggcaacacacaagcagctaccgcagatgtcaacacacaaggcgttcttccaggcatggtctggcaggacagagacgtgtacctgcaggggcccatctgggcaaagattccacacacggacggacattttcacccctctcccctcatgggcggattcggacttaaacaccctcctccacagattctcatcaagaacaccccggtacctgcgaatccttcgaccaccttcagtgcggcaaagtttgcttctttcatcacacagtattccacggggcaggtcagcgtggagatcgagtgggagctgcagaaggagaacagcaaacgctggaatcccgagatccagtacacttccaactacaacaaatctgttaatgtggactttactgttgacactaatggcgtgtattcagagcctcgccccattggcaccagatacctgactcgtaatctgtaa

SEQ ID NO: 199 - protein, 735 aa, Artificial Sequence
  source: /note="Description of Artificial Sequence: Synthetic polypeptide"
MAADGYLPDWLEDTLSEGIRQWWKLKPGPPPPKPAERHKDDSRGLVLPGYKYLGPFNGLDKGEPVNEADAAALEHDKAYDRQLDSGDNPYLKYNHADAEFQERLKEDTSFGGNLGRAVFQAKKRVLEPLGLVEEPVKTAPGKKRPVEHSPAEPDSSSGTGKAGQQPARKRLNFGQTGDADSVPDPQPLGQPPAAPSGLGTNTMASGSGAPMADNNEGADGVGNSSGNWHCDSTWMGDRVITTSTRTWALPTYNNHLYKQISSQSGASNDNHYFGYSTPWGYFDFNRFHCHFSPRDWQRLINNNWGFRPKRLNFKLFNIQVKEVTQNDGTTTIANNLTSTVQVFTDSEYQLPYVLGSAHQGCLPPFPADVFMVPQYGYLTLNNGSQAVGRSSFYCLEYFPSQMLRTGNNFTFSYTFEDVPFHSSYAHSQSLDRLMNPLIDQYLYYLSRTNTPSGTTTQSRLQFSQAGASDIRDQSRNWLPGPCYRQQRVSKTSADNNNSEYSWTGATKYHLNGRDSLVNPGPAMASHKDDEEKFFPQSGVLIFGKQGSEKTNVDIEKVMITDEEEIRTTNPVATEQYGSVSTNLQGGNTQAATADVNTQGVLPGMVWQDRDVYLQGPIWAKIPHTDGHFHPSPLMGGFGLKHPPPQILIKNTPVPANPSTTFSAAKFASFITQYSTGQVSVEIEWELQKENSKRWNPEIQYTSNYNKSVNVDFTVDTNGVYSEPRPIGTRYLTRNL

SEQ ID NO: 200 - DNA, 3161 bp, Artificial Sequence
  source: /note="Description of Artificial Sequence: Synthetic polynucleotide"
gattgaatttagcggccgcgaattcgcccttgctgcgtcaactggaccaatgagaactttccattcaatgattgcgtcgacaagatggtgatctggtgggaggagggaaagatgaccgccaaggtcatggagtcggccaaagccattctcggaggaagcaaggtgcgcgtggaccagaaatgtaagtcctcggcccagatagacccgactcccgtgattgtcacctccaacaccaacatgtgcgccgtgattgacgggaactcaacgaccttcgagcaccagcagccgttgcaagaccggatgttcaaatttgaactcacccgccgtctggatcatgactttgggaaggtcaccaagcaggaagtcaaagactttttccggtgggcaaaggatcacgtggttgaggtggagcatgaattctacgtcaaaaagggtggagccaagaaaagacccgcccccagtgacgcagatataagtgagcccaaacgggcgcgcgggtcagttgcgcagccatcgacgtcagacgcggaagcttcgatcaactacgcggacaggtaccaaaacaaatgttctcgtcacgtgggcatgaatctgatgctgtttccctgcagacaatgcgagagaatgaatcaaaattcaaatatctgcttcactcacggacagaaggactgtttagagtgctttcccgtgtcagaatctcaacccgtttctgtcgtcaaaaaggcgtatcagaaactttgctacattcatcatatcatgggaaaggtgccagacgcttgcactgcctgcgatctggtcaatgtggatttggatgactgcatctctgaacaataaatgatttaaatcaggtatggctgccgatggttatcttccagattggctcaaggacactctctctgaaggaataagacagtggtggaagctcaaacctggcccaccaccaccaaagcccgcagagcggcataaggacgacagcgggggtcttgtgcttcctgggtacaagtacctcggacccttcaacggactcgacaagggagagccggtcaacgaggcagacgccgcggccctcgagtacgacaaggcctacgaccggcagctcgacagcggagacaacccgtacctcaagtacaaccacgccgacgcggagtttcaggagcgccttaaagaagatacgtcttttgggggcaacctcggacgagcagtcttccaggcgaaaaagagggttcttgaacctctgggcctggttgaggaacctgttaagacggctccgggaaaaaagaggccggtagagcactctcctgtggagccagactcctcctcgggaacaggaaaagcgggccagcagcctgcgagaaagagattgaattttggtcagactggagacgcagactccgtacctgacccccagcctctcggacagccaccagcagccccctctggtctgggaactaatacgatggctacaggcagtggcgcaccaatggcagacaataacgagggcgccgacggagtgggtaattcctcgggaagttggcattgcgattccacatggatgggcgacagagtcatcaccaccagcacccgaacctgggctctgcccacctacaacaaccatctgtacaagcagatctccagccaatcaggagccagcaacgacaaccactactttggctacagcaccccttgggggtattttgacttcaacagattccactgccacttttcaccacgtgactggcaaagactcatcaacaacaactggggattccggcccaagagactcaacttcaagctctttaacattcaagtcaaggaggtcacgcagaatgacggtacgacgacgattgccaataaccttaccagcacggttcaggtgtttactgactcggagtaccagctcccgtacgtccccggctcggcgcatcaaggatgcctcccgccgttcccagcagacgtcttcatggtgccacagtatggatacctcaccctgaacaacgggagtcaggcagtaggacgctcttcattttactgcctggagtactttccttctcagatgcttcgtaccggaaacaactttaccttcagctacacctttgaggatgttcctttccacagcagctacgctcacagccagagtttggaccgtctcatgaatcctctcatcgaccagtacctgtattacttgagcagaacaaacactccaagcggaaccaccacgcagtccaggcttcagttttctcaggccggagcaagtgacattcgggaccagtctaggaactggcttcctggaccctgttaccgccagcagcgagtatcaaagacagctgcggacaacaacaacagtgaatactcgtggactggagctaccaagtaccacctcaatggcagagactctctggtgaatccgggcccggccatggccagccacaaggacgatgaagaaaagttttttcctcaaagcggggttctcatctttgggaagcaaggctcagagaaaacaaatgtggacattgaaaaggtcatgattacagacgaagaggaaatcagaaccaccaatcccgtggccacggagcagtatggttctgtatctaccaacctccagagcggcaacacacaagcagctactgcagatgtcaacacacaaggcgttcttccaggcatggtctggcaggacagagacgtgcacctgcaggggcctatctgggcaaagattccacacacggacggacattttcacccctctcccctcatgggcggatttggacttaaacaccctcctccacagattctcatcaagaacaccccggtacctgcaaatccttcgaccaccttcagtgcggcaaagtttgcttccttcatcacacagtattccacagggcaggtcagcgtggagatcgagtgggagctgcagaaggagaacagcaaacgctggaaccccgagatccagtacacttccaactacaacaaatctgttaatgtggactttactgtggacactaatggtgtgtattcagagcctcgccccattggcaccagatacctgactcgtaatctgtaattgcttgttaatcaataaaccgtttaattcgtttcagttgaactttggtctctgcgaagggcgaattcgtttaaaccctgcaggactagtccctttagtgagg

SEQ ID NO: 201 - DNA, 3162 bp, Artificial Sequence
  source: /note="Description of Artificial Sequence: Synthetic polynucleotide"
gaattgaatttagcggccgcgaattcgcccttcgcagagaccaaagttcaactgaaacgaattaaacggtttattgattaacaagcaattacagattacgagtcaggtatctggtgccaatggggcgaggctctgaatacacgccattagtgtccacagtaaagtccacattaacagacttgttgtagttggaagtgtactgaatttcgggattccagcgtttgctgttttccttctgcagctcccactcgatctccacgctgacctgtcccgtggagtactgtgtgatgaaggaagcaaactttgccgcactgaaggtggtcgaaggattcgcaggtaccggggtgttcttgatgagaatctgtggaggagggtgtttaagtccgaatccacccatgaggggagaggggtgaaaatgtccgtccgtgtgtggaatctttgcccagatgggcccctgaaggtacacatctctgtcctgccagaccatgcctggaagaacgccttgtgtgttgacatctgcggtagctgcttgtctgttgcctctctggaggttggtagatacagaaccgtactgctccgtagccacgggattggttgtcctgatttcctcttcgtctgtaatcatgaccttttcaatgtccacatttgttttctctgagccttgcttcccaaagatgagaaccccgctctgaggaaaaaacttttcttcattgtccttgtggcttgccatggccgggcccggattcaccagagagtctctgccattgaggtggtacttggtagctccagtccacgagtattcactgttgttgttatccgcagatgtctttgatactcgctgctggcggtaacagggtccaggaagccagttcctagactggtcccgaatgtcactcgctccggcctgagaaaactgaagccttgactgcgtggtggttccacttggagtgtttgttgtgctcaagtaatacaggtactggtcgatgagaggattcatgagacggtccagactctggctgtgagcgtagccgctgtggaaaggaacgtcctcaaaagtgtagctgaaggtaaagttgtttccggtacgcagcatctgagaaggaaagtactccaggcagtaaaatgaagagcgtcctactgcctgactcccgttgttcagggtgaggtatccatactgtggcaccatgaagacgtctgctgggaacggcgggaggcatccttgatgcgccgagccgaggacgtacgggagctggtactccgagtcagtaaacacctgaaccgtgctggtaaggttattggcaatcgtcgtcgtaccgtcattctgcgtgacctctttgacttgaatgttaaagagcttgaagttgagtctcttgggtcggaatccccagttgttgttgatgagtctttgccagtcacgtggtgaaaagtggcagtggaatctgttgaagtcaaaatacccccaaggggtgctgtagccaaagtagtgattgtcgttcgaggctcctgattggctggaaatttgtttgtagaggtggttgttgtaggtgggcagggcccaggttcgggtgctggtggtgatgactctgtcgcccatccatgtggaatcgcaatgccaatttcccgaggaattacccactccgtcggcgccctcgttattgtctgccattggtgcgccactgcctgtagccatcgtattagttcccagaccagagggggctgctggtggctgtccgagaggctgggggtcaggtactgagtctgcgtctccagtctgaccaaaattcaatctttttcttgcaggctgctggcccgcctttccggttcccgaggaggagtctggctccacaggagagtgctctaccggcctcttttttcctggagccgtcttgacaggttccccaaccaggcccagaggttcaagaaccctctttttcgcctggaagactgctcgtccgaggttgcccccaaaagacgtatcttctttaaggcgctcctgaaactccgcgtcggcgtggttgtacttgaggtacgggttgtctccgctgtcgagctgccggtcgtaggctttgtcgtgctcgagggccgcggcgtctgcctcgttgaccggctctcccttgtcgagtccgttgaagggtccgaggtacttgtacccaggaagcacaagacccctgctgtcgtccttatgccgctctgcgggctttggtggtggtgggccaggtttgagcttccaccactgtcttattccttcagagagagtgtcctcgagccaatctggaagataaccatcggcagccatacctgatttaaatcatttattgttcaaagatgcagtcatccaaatccacattgaccagatcgcaggcagtgcaagcgtctggcacctttcccatgatatgatgaatgtagcacagtttctgatacgcctttttgacgacagaaacgggttgagattctgacacgggaaagcactctaaacagtctttctgtccgtgagtgaagcagatatttgaattctgattcattctctcgcattgtctgcagggaaacagcatcagattcatgcccacgtgacgagaacatttgttttggtacctgtctgcgtagttgatcgaagcttccgcgtctgacgtcgatggctgcgcaactgactcgcgcacccgtttgggctcacttatatctgcgtcactgggggcgggtcttttcttggctccaccctttttgacgtagaattcatgctccacctcaaccacgtgatcctttgcccaccggaaaaagtctttgacttcctgcttggtgaccttcccaaagtcatgatccagacggcgggtgagttcaaatttgaacatccggtcttgcaacggctgctggtgttcgaaggtcgttgagttcccgtcaatcacggcgcacatgttggtgttggaggtgacgatcacgggagtcgggtctatctgggccgaggacttgcatttctggtccacgcgcaccttgcttcctccgagaatggctttggccgactccacgaccttggcggtcatcttcccctcctcccaccagatcaccatcttgtcgacacagtcgttgaagggaaagttctcattggtccagttgacgcagcaagggcgaattcgtttaaacctgcaggactagtccctttagtgaggg

SEQ ID NO: 202 - DNA, 3164 bp, Artificial Sequence
  source: /note="Description of Artificial Sequence: Synthetic polynucleotide"
gcgaattgaatttagcggccgcgaattcgcccttcgcagagaccaaagttcaactgaaacgaattaaacggtttattgattaacaagcaattacaaattacgagtcaggtatctggtgccaatggggcgaggctctgaatacacgccattagtgtccacagtaaagtccacattaacagacttgttgtagttggaagtgtactgaatttcgggattccagcgtttgctgttttccttctgcagctcccactcgatctccacgctgacctgtcccgtggagtactgtgtgatgaaggaagcaaactttgccgcactgaaggtggtcgaaggattcgcaggtaccggggtgttcttgatgagaatctgtggaggagggtgtttaggtccgaatccacccatgaggggagaggggtgaaaatgtccgtccgtgtgtggaatctttgcccagatgggcccctgaaggtacacatctctgtcctgccagaccatgcctggaagaacgccttgtgtgttgacatctgcggtagctgcttgtctgttgcctctctggaggttggtagatacagaaccatactgctccgtagccacgggattggttgtcctgatttcctcttcgtctgtaatcatgaccttttcaatgtccacatttgttttctctgagccttgcttcccaaagatgagaaccccgctctgaggaaaaaacttttcttcattgtccttgtggcttgccatggccgggcccggattcaccagagagtctctgccattgaggtggtacttggtagctccagtccacgagtattcactgttgttgttatccgcagatgtctttgatactcgctgctggcggtaacagggtccaggaagccagttcctagactggtcccgaatgtcactcgctccggcctgagaaaactgaagccttgactgcgtggtggttccacttggagtgtttgttgtgctcaagtaatacaggtactggtcgatgagaggattcatgagacggtccagactctggctgtgagcgtagctgctgtggaaaggaacgtcctcaaaagtgtagctgaaggtaaagttgtttccggtacgcagcatctgagaaggaaagtactccgggcagtaaaatgaagagcgtcctactgcctgactcccgttgctcagggtgaggtatccatactgtggcaccatgaagacgtctgctgggaacggcgggaggcatccttgatgcgccgagccgaggacgtacgggagctggtactccgagtcagtaaacacctgaaccgtgctggtaaggttattggcaatcgtcgtcgtaccgtcattctgcgtgacctctttgacttgaatgttaaagagcttgaagttgagtctcttgggtcggaatccccagttgttgttgatgagtctttgccagtcacgtggtgaaaagtggcagtggaatctgttgaagtcaaaatacccccaaggggtgctgtagccaaagtagtgattgtcgttcgaggctcctgattggctggaaatttgtctgtagaggtggttgttgtaggtgggcagggcccaggttcgggtgctggtggtgatgactctgtcgcccatccatgtggaatcgcaatgccgatttcccgaggaattacccactccgtcggcgccctcgttattgtctgccattggtgcgccactgcctgtagccatcgtattagttcccagaccagagggggctgctggtggctgtccgagaggctgggggtcaggtactgagtctgcgtctccagtctgaccaaaattcaatctttttcttgcaggctgctggcccgcctttccggttcccgaggaggagtctggctccacaggagagtgctctaccggcctcttttttcccggagccgtcttaacaggttccccaaccaggcccagaggttcaagaaccctctttttcgcctggaagactgctcgtccgaggttgcccccaaaagacgtatcttctttaaggcgctcctgaaactccgcgtcggcgtggttgtacttgaggtacgggttgtctccgctgtcgagctgccggtcgtaggctttgtcgtgctcgagggccgcggcgtctgcctcgttgaccggctctcccttgtcgagtccgttgaagggtccgaggtacttgtacccaggaagcacaagacccctgctgtcgtccttatgccgctctgcgggctttggtggtggtgggccaggtttgagcttccaccactgtcttattccttcagagagagtgtcctcgagccaatctggaagataaccatcggcagccatacctgatttaaatcatttattgttcaaagatgcagtcatccaaatccacattgaccagatcgcaggcagtgcaagcgtctggcacctttcccatgatatgatgaatgtagcacagtttctgatacgcctttttgacgacagaaacgggttgagattctgacacgggaaagcactctaaacagtctttctgtccgtgagtgaagcagatatttgaattctgattcattctctcgcattgtctgcagggaaacagcatcagattcatgcccacgtgacgagaacatttgttttggtacctgtctgcgtagttgatcgaagcttccgcgtctgacgtcgatggctgcgcaactgactcgcgcacccgtttgggcccacttatatctgcgtcactgggggcgggtcttttcttggctccaccctttttgacgtagaattcatgctccacctcaaccacgtgatcctttgcccaccggaaaaagtctttgacttcctgcttggtgaccttcccaaagtcatgatccagacggcgggtgagttcaaatttgaacatccggtcttgcaacggctgctggtgttcgaaggtcgttgagttcccgtcaatcacggcgcacatgttggtgttggaggtgacgatcacgggagtcgggtctatctgggccgaggacttgcatttctggtccacgcgcaccttgcttcctccgagaatggctttggccgactccacgaccttggcggtcatcttcccctcctcccaccagatcaccatcttgtcgacacagtcgttgaagggaaagttctcattggtccagttgacgcagcaagggcgaattcgtttaaacctgcaggactagtccctttagtgaggg

SEQ ID NO: 203 - DNA, 3163 bp, Artificial Sequence
  source: /note="Description of Artificial Sequence: Synthetic polynucleotide"
accctcactaaagggactagtcctgcaggtttaaacgaattcgcccttgctgcgtcaactggagcaatgagaactttcccttcaacgactgtgtcgacaagatggtgatttggtgggaggaggggaagatgaccgccaaggtcgtggagtcggccaaagccattctcggaggaagcaaggtgcgcgtggaccagaaatgcaagtcctcggcccagatagatccgactcccgtgatcgtcacctccaacaccaacatgtgcgccgtgattgacgggaactcaacgaccttcgaacaccagcagccgttgcaagaccggatgttcaaatttgaactcacccgccgtctggatcatgactttgggaaggtcaccaagcaggaagtcaaagactttttccggtgggcaaaggatcacgtggttgaggtggagcatggattctacgtcaaaaagggtggagccaagaaaagacccgcccctagtgacgcagatataagtgagcccaaacgggtgcgcgagtcagttgcgcagccatcgacgtcggacgcggaagcttcgatcaactacgcggacaggtaccaaaacaaatgttctcgtcacgtgggcatgaatctgatgctgtttccctgcagacaatgcgagagaatgaatcaaaattcaaatatctgcttcactcacggacagaaagactgtttagagtgctttcccgtgtcagaatctcaacctgtttctgtcgtcaaaaaggcgtatcagaaactgcgctacattcatcatatcatgggaaaggtgccagacgcttgcactgcctgcgatctggtcaatgtggatttggatgactgcatctctgaacaataaatgatttaaatcaggtatggctgccgatggttatcttccagattggctcgaggacactctctctgaaggaataagacagtggtggaagctcaaacctggcccaccaccaccaaagcccgcagagcggcataaggacgacagcaggggtcttgtgcttcctgggtacaagtacctcggacccttcaacggactcgacaagggagagccggtcaacgaggcagacgccgcggccctcgagcacgacaaggcctacgaccggcagctcgacagcggagacaacccgtacctcaagtacaaccacgccgacgcggagtttcaggagcgtcttaaagaagatacgtcttttgggggcaacctcggacgagcagtcttccaggcgaaaaagagggttcttgaacctctgggcctggttgaggaacctgttaagacggctccgggaaaaaagaggccggtagagcactctcctgcggagccagactcctcctcgggaaccggaaaagcgggccagcagcctgcaagaaaaagactgaatttcggtcagactggagacgcagactccgtacctgacccccagcctctcggacagccaccagcagcccccacaagtttgggatctactacaatggctacaggcagtggcgcaccaatggcagacaataacgagggtgccgatggagtgggtaattcctcaggaaattggcattgcgattcccaatggctgggcgacagagtcatcaccaccagcacccgaacctgggccctgcccacctacaacaaccacctttacaagcaaatctccagccaatcaggagcctcaaacgacaaccactactttggctacagcaccccctgggggtattttgacttcaacagattccactgccacttttcaccacgtgactggcaaagactcatcaacaacaactggggattccgacccaagagactcaacttcaagctctttaacattcaagtcaaagaggtcacgcagaatgacggtacgacgacgattgccaataaccttaccagcacggttcaggtgtttactgactcggagtaccagctcccgtacgtcctcggctcggcgcatcaaggatgcctcccgccgtttccagcggacgtcttcatggtcccacagtatggatacctcaccctgaacaacgggagtcaggcggtaggacgctcttccttttactgcctggagtgctttccttctcagatgctgcgtactggaaacaactttcagttcagctacacttttgaagacgtgcctttccacagcagctacgctcacagccagagtttggatcggctgatgaatcctctgatcgaccagtacctgtattatctaaacagaacacaaacagctagtggaactcagcagtctcggctactgtttagccaagctggacccacaagcatgtctcttcaagctaaaaactggctgcctggaccgtgttatcgccagcagcgtttgtcaaagcaggcaaacgacaacaacaacagcaactttccctggactggagctaccaagtaccacctcaatggcagagactctttggtgaacccgggcccggccatggccagccacaaggacgatgaagaaaagtttttccccatgcatggaaccctaatatttggtaaagaaggaacaaatgctaccaacgcggaattggaaaatgtcatgattacagatgaagaggaaatcaggaccaccaatcccgtggctacagagcagtacggatatgtgtcaaataatttgcaaaactcaaatactgctgcaagtactgaaactgtgaatcaccaaggagcattacctggtatggtgtggcaggatcgagacgtgtacctgcagggacccatttgggccaagattcctcacaccgatggacactttcatccttctccactgatgggaggttttggactcaaacacccgcctcctcagattatgatcaaaaacactcccgttccagccaatcctcccacaaacttcagttctgccaagtttgcttccttcatcacacagtattccacgggacaggtcagcgtggagatcgagtgggagctgcagaaggagaacagcaaacgctggaatcccgaaattcagtacacttccaactacaacaaatctgttaatgtggactttactgtggacactaatggtgtgtattcagagcctcgccccattggcaccagatacctgactcgtaatctgtaattgcttgttaatcaataaaccgtttaattcgtttcagttgaactttggtctctgcgaagggcgaattcgcggccgctaaattcaattcgcc

SEQ ID NO: 204 - protein, 735 aa, Artificial Sequence
  source: /note="Description of Artificial Sequence: Synthetic polypeptide"
MAADGYLPDWLEDTLSEGIRQWWKLKPGPPPPKPAERHKDDSRGLVLPGYKYLGPFNGLYKGEPVDEADAAALEHDKAYDRQLDSGDNPYLKYNHADAEFQERLKEDTSFGGNLGRAVFQAKKRVLEPLGLVGEPVKTAPGKKRPVEHSPVEPDSSSGTGKAGNQPARKRLNFGQTGDADSVPDPQPLGQPPAAPSGLGSTTMATGSGAPVADNNEGADGVGNSSGNWHCDSQWLGDRVITTSTRTWALPTYNNHLYKQISSQSGASNDNHYFGYSTPWGYFDFNRFHCHFSPRDRQRLINNNWGFRPKRLNFKLFNIQVKEVTQNDGTTTIANNLTSTVQVFTDSGYQLPYVLGLAHQGCLPPFPADVFMVPQYGYLTLNNGSQAVGRSSFYCLEYFPSQMLRTGNNFQFSYTFEDVPFHSSYAHSQSLDRLMNPLIDQYLYYLNKTQSNSGTLQQSRLLFSQAGPTSMSLQAKNWLPGPCYRQQRLSKQANDNNNSNFPWTAATKYHLNGRDSLVNPGPAMASHKDDEEKFFPMHGTLIFGKQGTNANDADLDNVMITDEEEIRTTNPVATEQYGYVSNNLQNSNTGPTTGTVNHQGALPGMVWQDRDVYLQGPIWAKIPHTDGHFHPSPLMGGFGLKHPPPQIMIKNTPVPANPPTNFSSAKFASFITQYSTGQVSVEIEWELQKEDSKRWNPEIQYTSNYNKPVNVDFTVDTNGVYSEPRPIGTRYLTRNL

SEQ ID NO: 205 - DNA, 2208 bp, Artificial Sequence
  source: /note="Description of Artificial Sequence: Synthetic polynucleotide"
atggctgccgatggttatcttccagattggctcgaggacactctctctgaaggaataagacagtggtggaagctcaaacctggcccaccaccaccaaagcccgcagagcggcataaggacgacagcaggggtcttgtgcttcctgggtacaagtacctcggacccttcaacggactctacaagggagagccggtcgacgaggcagacgccgcggccctcgagcacgacaaggcctacgaccggcagctcgacagcggagacaacccgtacctcaagtacaaccacgccgacgcggagtttcaggagcgccttaaagaagatacgtcttttgggggcaacctcggacgagcagtcttccaggccaaaaagagggttcttgaacctctgggcttggttggggagcctgttaaaacggctccgggaaaaaagaggccggtagagcactctcctgtggagccagactcctcctcgggaaccggaaaagcgggcaaccagcctgcaagaaaaagattgaattttggtcagactggagacgcagactccgtacctgacccccagcctctcggacagccaccagcagccccctctggtctgggatctactacaatggctacaggcagtggcgcaccagtggcagacaataacgagggtgccgatggagtgggtaattcctcaggaaattggcattgcgattcccaatggctgggcgacagagtcatcaccaccagcacccgaacctgggctctgcccacctacaataaccacctctacaagcaaatctccagccaatcaggagcctcaaacgacaaccactactttggctacagcaccccctgggggtattttgacttcaacagattccactgccacttttcaccacgtgaccggcaaagactcatcaacaacaactggggattccgaccaaaaagactcaacttcaagctctttaacattcaagtcaaagaggtcacgcagaatgacggtacgacgacgattgccaataaccttaccagcacggttcaggtgtttactgactcggggtaccagctcccgtacgtcctcggcttggcgcatcaaggatgcctcccgccgttcccagcagacgtcttcatggtgccacagtatggatacctcaccctgaacaacgggagtcaggcggtaggacgctcttccttttactgcctggagtactttccttctcagatgctgcgtactggaaacaactttcagttcagctacacctttgaagacgttcctttccacagcagctacgctcacagccagagtctggatcggctgatgaatcctctgatcgaccagtacctgtattatctgaacaagacacaatcaaatagtggaactcttcagcagtctcggctactgtttagccaagctggacccaccagcatgtctcttcaagctaaaaactggctgcctggaccttgctacagacagcagcgtctgtcaaagcaggcaaacgacaacaacaacagcaactttccctggactgcggctacaaagtatcatctaaatggccgggactcgttggttaatccaggaccagctatggccagccacaaagacgatgaagaaaagtttttccccatgcatggaaccctgatatttggtaaacaaggaacaaatgctaacgacgcggatttggacaatgtcatgattacagatgaagaagaaatccgcaccaccaatcccgtggctacggagcagtacggatatgtgtcaaataatttgcaaaactcaaatactggtccaactactggaactgtcaatcaccaaggagcgttacctggtatggtgtggcaggatcgagacgtgtacctgcagggacccatttgggccaagattcctcacaccgatggacactttcatccttctccacttatgggaggttttggactcaaacacccacctcctcagatcatgattaaaaacactcccgttccagccaatcctcccacaaacttcagttctgccaagtttgcttctttcatcacacagtattccacgggacaagtcagcgtggagatcgagtgggagctgcagaaggaggacagcaaacgctggaaccccgagatccagtacacttccaactataacaaacctgttaatgtggactttactgtggacactaatggtgtgtattcagagcctcgccccattggcaccagatacctgactcgtaatctgtaa

SEQ ID NO: 206 - DNA, 3161 bp, Artificial Sequence
  source: /note="Description of Artificial Sequence: Synthetic polynucleotide"
cgaattgatttagcggccgcgaattcgcccttcgcagagaccaaagttcaactgaaacgaattaaacggtttattgattaacaagcaattacagattacgagtcaggtatctggtgccaatggggcgaggctctgaatacacaccattagtgtccacagtaaagtccacattaacagatttgttgtagttggaagtgtactggatctcgggattccagcgtttgctgttctccttctgtagctcccactcgatctccacgctgacccgccccgtggaatactgtgtgatgaaggaagcaaactttgccgcactgaaggtggtcgaaggattcgcaggtaccggggtgtttttgatgagaatctgtggaggagggtgtttaagtccgaatccgcccatgaggggagaggggtgaaaatgtccgtccgtgtgcggaatctttgcccagataggcccctgcaggtacacgtctctgtcctgccagaccatgcctggaagaacgccttgtgtgttgacatctgcagtagatgcttgtgtgttgccgctctggaggttggtagatacagaaccatactgctccgtggccacgggattggtggttctgatttcctcttcgtctgtaatcatgaccttttcaatgtccacatttgttttctctgatccttgttttccaaagatgagaaccccgctctgaggaaaaaacttttcttcatcgtccttgtggctggccattgccgggcccggattcaccagagagtctctgccattgaggtggtacttggtagctccaatccacgagtattcactgttgttgttgtccgcagatgtctttgatactcgctgctggcggtaacagggtccaggaagccagttcctagactgatcccgaatgtcactcgctccggcctgagaaaactgaagcctggactgcgtggtggttccgcttggagtgtttgttctgctcaagtaatacaggtactggtcgatgagaggattcatgagacggtccaaactctggctgtgagcgtagctgctgtggaaaggaacatcctcaaaggtgtagctgaaggtaaagttgtttccggtacgcagcatctgagaagggaagtactccaggcagtaaaatgaagagcgtcctactgcctgactcccgttgttcagggtgaggtatccatactgtggcaccatgaagacgtctgctgggaacggcgggaggcatccttgatgcgccgagccgaggacgtacgggagctggtactccgagtcagtaaacacctgaaccgtgctggtaaggttattggcaatcgtcgtcgtaccatcattctgcgtgacctctctgacttgaatgttaaagagcttgaagttgagtctcttgggccggaatccccagttgttgttgatgagtctttgccagtcacgtggtgaaaagtggcagtggaatctgttgaagtcaaaatacccccaaggggtgctgtagccaaagtagtggttgtcgttgctggctcctgattggctggaaatctgcttgtacagatggttgttgtaggtgggcagagcccaggttcgggtgctggtggtgatgactctgtcgcccatccatgtggaatcgcaatgccaatttcccgaggaattacccactccgtcggcgccatcgttattgtctgccattggtgcgccactgcctgtagccatcgtattagttcccagaccagagggggctgctggtggctgtccgagaggctgggggtcaggtacggagtctgcgtctccagtctgaccgaaattcaatctctttcttgcaggctggttgcccgcttttccggttcccgaggaggagtctggctccacaggagagtgctctaccggcctcttttttcccggagccgtcttaacaggctcctcaaccaggcccagaggttcaagaaccctcttttttgcctggaagactgctcgtccgaggttgcccccaaaagacgtatcttctttaaggcgctcctgaaactccgcgtcggcgtggtcgtacttgaggtacgggttgtctccgctgtcgagctgccggtcgtaggccttgtcgtgctcgagggccgcggcgtctgcctcgttgaccggctctcccttgtcgagtccgttgaagggtccgaggtacttgtacccaggaagcacaagacccctgctgtcgtccttatgccgctctgcgggctttggtggtggtgggccaggtttgagcttccaccactgtcttattccttcagagagagtgtcctcgagccaatctggaagataaccatcggcagccatacctgatttaaatcatttattgttcagagatgcagtcatccaaatccacattgaccagatcgcaggcagtgcaagcgtctggcacctttcccatgatatgatgaatgtagcaaagtttctgatacgcctttttgacgacagaaacgggttgagattctgacacgggaaagcactctaaacagtctttctgtccgtgagtgaagcagatatttgaattctgattcattctctcgcattgtctgcagggaaacagcatcagattcatgcccacgtgacgagaacatttgttttggtacctgtccgcgtagttgatcgaagcttccgcgtctgacgtcgatggctgcgcaactgactcgcgcgcccgtttgggctcacttatatctgcgtcactgggggcgggtcttttcttggctccaccctttttgacgtagaattcatgctccacctcaaccacgtgatcctttgcccaccggaaaaagtctttcacttcctgcttggtgaccttcccaaagtcatgatccagacggcgggttagttcaaatttgaacatccggtcttgcaacggctgctggtgttcgaaggtcgttgagttcccgtcaatcacggcgcacatgttggtgttggaggtggcgatcacgggagtcgggtctatctgggccgaggacttgcacttttggtccacgcgcaccttgcttcctccgagaatggcttcggccgattccacgaccttggcggtcatctttccctcctcccaccagatcaccatcttgtcgacacagtcgttgaagggaaagttctcattggtccagttgacgcagcaagggcgaattcgtttaaacctgcaggaactagtcccttagtgagg

SEQ ID NO: 207 - protein, 735 aa, Artificial Sequence
  source: /note="Description of Artificial Sequence: Synthetic polypeptide"
MAADGYLPDWLEDTLSEGIRQWWKLKPGPPPPKPAERHKDDSRGLVLPGYKYLGPFNGLYKGEPVNEADAAALEHDKAYDRQLDSGDNPYLKYNHAGAEFQERLKEDTSFGGNLGRAVFQAKKRVLEPLGLVEEPVKTAPGKKRPVEHSPVEPDSSSGTGKAGNQPARKRLNFGQTGDADSVPDPQPLGQPPAAPSGLGSTTMATGSGAPVADNNEGADGVGNSSGNWHCDSQWLGDRVITTSTRTWALPTYNNHLYKQISSQSGASNDNHYFGYSTPWGYFDFNRFHCHFSPRDWQRLINNNWGFRPKRLNFKLFNIQVKEVTQNDGTTTIANNLTSTVQVFTDSEYQLPYVLGSAHQGCLPPFPADVFMVPQYGYLTLNNGSQAVGRSSFYCLEYFPSQMLRTGNNFQFSYTFEDVPFHSSYAHSQSLDRLMNPLIDQYLYYLNKTQSNSGTLQQSRLLFSQAGPTSMSLQAKNWLPGPCYRQQRLSKQANDNNNSNFPWTAATKYHLNGRDSLVNPGPAMASHKDDEEKFFPMHGTLIFGKQGTNANDADLDNVMITDEEEIRTTNPVATEQYGYVSNNLQDSNTGPTTGTVNHQGALPGMVWQDRDVYLQGPIWAKIPHTDGHFHPSPLMGGFGLKHPPPQIMIKNTPVPANPPTNFSSAKFASFITQYSTGQVSVEIEWELQKENSKRWNPEIQYTSNYNKSVNVDFTVDTNGVYSEPRPIGTRYLTRNL

SEQ ID NO: 208 - DNA, 2208 bp, Artificial Sequence
  source: /note="Description of Artificial Sequence: Synthetic polynucleotide"
atggctgccgatggttatcttccagattggctcgaggacactctctctgaaggaataagacagtggtggaagctcaaacctggcccaccaccgccaaagcccgcagagcggcataaggacgacagcaggggtcttgtgcttcctgggtacaagtacctcggacccttcaacggactctacaagggagagccggtcaacgaggcagacgccgcggccctcgagcacgacaaggcctacgaccggcagctcgacagcggagacaacccgtacctcaagtacaaccacgccggcgcggagtttcaggagcgccttaaagaagatacgtcttttgggggcaacctcggacgagcagtcttccaggccaaaaagagggttcttgaacctctgggcttggttgaggagcctgttaaaacggctccgggaaaaaagaggccggtagagcactctcctgtggagccagactcctcctcgggaaccggaaaagcgggcaaccagcctgcaagaaaaagattgaattttggtcagactggagacgcagactccgtacctgacccccagcctctcggacagccaccagcagccccctctggtctgggatctactacaatggctacaggcagtggcgcaccagtggcagacaataacgagggtgccgatggagtgggtaattcctcaggaaattggcattgcgattcccaatggctgggcgacagagtcatcaccaccagcacccgaacctgggctctgcccacctacaacaaccacctctacaagcaaatctccagccaatcaggagcctcaaacgacaaccactactttggctacagcaccccctgggggtattttgacttcaacagattccactgccacttttcaccacgtgactggcaaagactcatcaacaacaactggggattccgaccaaagagactcaacttcaagctctttaacattcaagtcaaagaggtcacgcagaatgacggtacgacgacgattgccaataaccttaccagcacggttcaggtgtttactgactcggagtaccagctcccgtacgtcctcggctcggcgcatcaaggatgcctcccgccgttcccagcagacgtcttcatggtgccacagtatggatacctcaccctgaacaacgggagtcaggcggtaggacgctcttccttttactgcctggagtactttccttctcagatgctgcgtactggaaacaactttcagttcagctacacctttgaagacgttcctttccacagcagctacgctcacagccagagtctggatcggctgatgaatcctctgatcgaccagtacctgtattatctgaacaagacacaatcaaatagtggaacccttcagcagtctcggctactgtttagccaagctggacccaccagcatgtctcttcaagctaaaaactggctgcctggaccttgctacagacagcagcgtctgtcaaagcaggcaaacgacaacaacaacagcaactttccctggactgcggctacaaagtatcatctaaatggccgggactcgttggttaatccaggaccagctatggccagccacaaagacgatgaagaaaagtttttccccatgcatggaaccctgatatttggtaaacaaggaacaaatgctaacgacgcggatttggacaatgtcatgattacagatgaagaagaaatccgcaccaccaatcccgtggctacggagcagtacggatatgtgtcaaataatttgcaagactcaaatactggtccaactactggaactgtcaatcaccaaggagcgttacctggtatggtgtggcaggatcgagacgtgtacctgcagggacccatttgggccaagattcctcacaccgatggacactttcatccttctccacttatgggaggttttggactcaaacacccacctcctcagatcatgattaaaaacactcccgttccagccaatcctcccacaaacttcagttctgccaagtttgcttctttcatcacacagtattccacgggacaagtcagcgtagagatcgagtgggagctgcagaaggagaacagcaaacgctggaaccccgagatccagtacacttccaactataacaaatctgttaatgtggactttactgtggacactaatggtgtgtattcagagcctcgccccattggcaccagatacctgactcgtaatctgtaa

SEQ ID NO: 209 - protein, 738 aa, Artificial Sequence
  source: /note="Description of Artificial Sequence: Synthetic polypeptide"
MAADGYLPDWLEDNLSEGIREWWDLKPGAPKPKANQQKQDDGRGLVLPGCKYLGPFNGLDKGEPVNAADAAALEHDKAYDQQLKAGDNPYLRYNHADAEFQERLQEDTSFGGNLGRAVFQAKKRVLEPLGLVEEGAKTAPGKKRPVEPSPQRSPDSSTGIGKTGQQPAKKRLNFGQTGDSESVPDPQPIGEPPAGPSGLGSGTMAAGGGAPMADNNEGADGVGSSSGNWHCDSTWLGDRVITTSTRTWALPTYNNHLYKQISNGTSGGSTNDNTYFGYSTPWGYFDFNRFHCHFSPRDWQRLINNNWGFRPKRLNFKLFNIQVKEVTQNEGTKTIANNLTSTIQVFTDSEYQLPYVLGSAHQGCPPPFPADVFMIPQYGYLTLNNGSQAVGRSSFYCLEYFPSQMRRTGNNFEFSYQFEDVPFHSSYAHSQSLDRLMNPLIDQYLYYLSRTQSTGGTAGTQQLLFSQAGPNNMSAQAKNWLPGPCYRQQRVSTTLSQNNNSNFAWTGATKYHLNGRDSLVNPGVAMATHKDDEERFFPSSGVLMFGKQGAGKDNVDYSSVMLTSEEEIKTTNPVATEQYGVVADNLQQQNAAPIVGAVNSQGALPGMVWQNRDVYLQGPIWAKIPHTDGNFHPSPLMGGFGLKHPPPQILIKNTPVPADPPTTFSQAKLASFITQYSTGQVSVEIEWELQKENSKRWNPEIQYTSNYNKSVNVDFTVDTNGVYSEPRPIGTRYLTRNL

SEQ ID NO: 210 - DNA, 2217 bp, Artificial Sequence
  source: /note="Description of Artificial Sequence: Synthetic polynucleotide"
atggctgccgatggttatcttccagattggctcgaggacaacctctctgagggcattcgcgagtggtgggacttgaaacctggagccccgaaacccaaagccaaccagcaaaagcaggacgacggccggggtctggtgcttcctggctgcaagtacctcggacccttcaacggactcgacaagggggagcccgtcaacgcggcggacgcagcggccctcgagcacgacaaggcctacgaccagcagctcaaagcgggtgacaatccgtacctgcggtataaccacgccgacgccgagtttcaggagcgtctgcaagaagatacgtcttttgggggcaacctcgggcgagcagtcttccaggccaagaagcgggttctcgaacctctcggtctggttgaggaaggcgctaagacggctcctggaaagaagagaccggtagagccatcaccccagcgttctccagactcctctacgggcatcggcaagacaggccagcagcccgcgaaaaagagactcaactttgggcagactggcgactcagagtcagtgcccgaccctcaaccaatcggagaaccccccgcaggcccctctggtctgggatctggtacaatggctgcaggcggtggcgctccaatggcagacaataacgaaggcgccgacggagtgggtagttcctcaggaaattggcattgcgattccacatggctgggcgacagagtcatcaccaccagcacccgaacctgggccctccccacctacaacaaccacctctacaagcaaatctccaacgggacatcgggaggaagcaccaacgacaacacctacttcggctacagcaccccctgggggtattttgactttaacagattccactgccacttctcaccacgtgactggcagcgactcatcaacaacaactggggattccggcccaagagactcaacttcaagctcttcaacatccaggtcaaggaggtcacgcagaatgaaggcaccaagaccatcgccaataaccttaccagcacgattcaggtctttacggactcggaataccagctcccgtacgtcctcggctctgcgcaccagggctgcccgcctccgttcccggcggacgtcttcatgattcctcagtacgggtacctgactctgaacaacggcagtcaggccgtgggccgttcctccttctactgcctggagtactttccttctcaaatgcggagaacgggcaacaactttgagttcagctaccagtttgaggacgtgccttttcacagcagctacgcgcatagccaaagcctggaccggctgatgaaccccctcatcgaccagtacctgtactacctgtctcggactcagtccacgggaggtaccgcaggaactcagcagttgctattttctcaggccgggcctaataacatgtcggctcaggccaaaaactggctacccgggccctgctaccggcagcaacgcgtctccacgacactgtcgcaaaataacaacagcaactttgcttggaccggtgccaccaagtatcatctgaatggcagagactctctggtaaatcccggtgtcgctatggcaacgcacaaggacgacgaagagcgattttttccatccagcggagtcttgatgtttgggaaacagggagctggaaaagacaacgtggactatagcagcgttatgctaaccagtgaggaagaaatcaaaaccaccaacccagtggccacagaacagtacggcgtggtggccgataacctgcaacagcaaaacgccgctcctattgtaggggccgtcaacagtcaaggagccttacctggcatggtctggcagaaccgggacgtgtacctgcagggtcctatctgggccaagattcctcacacggacggcaactttcatccttcgccgctgatgggaggctttggactgaaacacccgcctcctcagatcctgattaagaatacacctgttcccgcggatcctccaactaccttcagtcaagccaagctggcgtcgttcatcacgcagtacagcaccggacaggtcagcgtggaaattgaatgggagctgcagaaagagaacagcaagcgctggaacccagagattcagtatacttccaactataacaaatctgttaatgtggactttactgtggacactaatggtgtgtattcagagcctcgccccattggcaccagatacctgactcgtaatctgtaa

SEQ ID NO: 211 - DNA, 3167 bp, Artificial Sequence
  source: /note="Description of Artificial Sequence: Synthetic polynucleotide"
attgaatttagcggccgcgaattcgcccttcgcagagaccaaagttcaactgaaacgaattaaacggtttattgattaacaagcaattacagattacgagtcaggtacctggtgccaatggggcgaggctctgaatacacaccattagtgtccacagtaaagtccacattaacagatttgttgtagttggaagtgtactgaatctcgggattccagcgtttgctgttctccttctgcagctcccactcgatctccacgctgacctgccccgtggagtactgtgtaatgaaggaagcaaactttgccgcactgaaggtagtcgaaggattcgcaggtaccggggtgttcttgatgagaatctgcgggggagggtgtttaagtccgaatccgcccatgaggggagaggggtgaaaatgtccgtccgtgtgtggaatctttgcccagatgggcccctgcaggtacacgtctctgtcctgccacaccatgcctggaagaacgccttgtgtgttgacatctgaggtagctgcttgtgtgttgccgctctggaggttggtagatacagaaccatactgctccgtagccacgggattggtggtcctgatttcctcttcgtctgtaatcatgaccttttcaatgtccacattagtttttcccgagtcttgttttccaaagatgagaaccccgctctgaggaaaaaacttttcttcatcgtccttgtggctggccatggccgggcccggattcaccagagagtctcttccattaaggtggtacttggtagctccagtccacgagtattcactgttgttgttatccgcagatgtctttgatactcgctgctggcggtaacagggtccaggaagccagttcctagactggtcccgaatgtcacttgctccggcctgagaaaactgaagccttgactgcgtggtggttccgcttggagtgtttgttctgctcaagtaatacaggtactggtcgatgagaggattcatgagacggtccaaactctggctgtgggcgtagctgctgtggaaaggaacgtcctcaaaggtgtagctgaaggtaaagttgtttccggtacgcagcatctgagaaggaaagtactccaggcagtaaaatgaagagcgtcctactgcctgactcccgttgttcagggtgaggtatccatactgtggcaccatgaagacgtctgctgggaacggcgggaggcatccttgatgcgccgagccgaggacgtacgggagctggtactccgagtcagtaaacacctgaaccgtgctggtaaggttattggcaatcgtcgtcgtaccgtcattctgcgtgacctccttgacttgaatgttaaagagcttgaagttgagtcttttgggccggaatccccaattgttgttgatgagtctttgccagtcacgtggcgaaaagtggcagtggaatctgttgaagtcaaaatacccccaaggggtgctgtagccaaagtagtggttgtcgtttgaggctcctgattggctggaaatctgcttgtagaggtggttgttgtaggtgggcagagcccaggtgcgggtgctggtggtgatgactctgtcgcccatccatgtggaatcgcaatgccaatttcccgaggaattacccactccgtcggcgccctcgttattgtctgccattggtgcgccactgcctgtagccatcgtattagttcccagaccagagggggctgctggtggctgtccgagaggctgggggtcaggtacggagtctgcgtctccagtctgaccgaaattcaatctctttcttgcaggctgctggcccgcttttccggttcccgaggaggagtctggctccgcaggagagtgctctaccggcctcttttttcccggagccgtcttaacaggttcctcaaccaggcccagaggttcaagaaccctctttttcgcctggaagactgctcgtccgaggttgcccccaaaagacgtatcttctttaagacgctcctggaactccgcgtcggcgtggttgtacttggggtacgggttgtctccgctgtcgagctgccggtcgtaggccttgtcgtgctcgagggccgcggcgtctgcctcgttgaccggctctcccttgtcgagtccgttgaagggtccaaggtacttgtacccaggaagcacaagacccctgctgtcgtccttatgccgctctgcgggctttggtggtggtgggccaggtttgagcttccaccactgtcttattccttcagagagagtgtcctcgagccaatctggaagataaccatcggcagccatacctgatttaaatcatttattgttcagagatgcagtcatccaaatccacattgaccagatcgcaagcagtgcaagcgtctggcacctttcccatgatatgatgaatgtagcacagtttctgatacgcctttttgacgacagaaacgggttgagattctgacacgggaaagcactctaaacagtctttctgtccgtgagtgaagcagatatttgaattctgattcattctctcgcattgtctgcagggaaacagcatcagattcatgcccacgtgacgagaacatttgttttggtacctgtccgcgtagttgattgaagcttccgcgtctgacgtcgatggctgcgcaactgactcgcgcgcccgtttgggctcacttatatctgcgtcactgggggcgggtctttttttggctccaccctttttgacgtagaattcatgctctacctcaaccacgtgatcctttgcccaccggaaaaagtctttgacttcctgcttggtgaccttcccaaagtcatgatccagacggcgggtgagttcaaatttgaacatccggtcttgcaacggctgctggtgttcgaaggtcgttgagttcccgtcaatcactgcgcacatgttggtgttggaggtgacaatcacgggagtcgggtctatctgggccgaggacttgcatttctggtccacgcgcaccttgcttcctccgagaatggctttggccgactccacgaccttggcggtcatcttcccctcctcccaccagatcaccatcttgtcgacgcaatcattgaaaggaaagttctcattggtccagttgacgcagccgtagaaagggcgaattcgtttaaacctgcaggactagtccctttagtgagggt

SEQ ID NO: 212 - DNA, 3161 bp, Artificial Sequence
  source: /note="Description of Artificial Sequence: Synthetic polynucleotide"
aattgaatttagcggccgcgaattcgcccttcgcagagaccaaagttcaactgaaacgaattaaacggtttattgattaacaagcaattacagattacgagtcaggtatctggtgccaatggggcgaggctctgaatacacaccattagtgtccacagtaaagtccacattaacagatttgttgtagttggaagtgtactgaatctcgggattccagcgtttgctgttctccttctgcagctcccactcgatctccacgctgacctgccccgtggagtactgtgtaatgaaggaagcaaactttgccgcactgaaggtagtcgaaggattcgcaggtaccggggtgttcttgatgagaatctgcgggggagggtgtttaagtccgaatccgcccatgaggggagaggggtgaaaatgtccgtccgtgtgtggaatctttgcccagatgggcccctgcaggtacacgtctctgtcctgccacaccatgcctggaagaacgccttgtgtgttgacatctgaggtagctgcttgtgtgttgccgctctggaggttggtagatacagaaccatactgctccgtagccacgggattggtggtcctgatttcctcttcgtctgtaatcatgaccttttcaatgtccacattagtttttcccgagtcttgttttccaaagatgagaaccccgctctgaggaaaaaacttttcttcatcgtccttgtggctggccatggccgggcccggattcaccagagagtctcttccattaaggtggtacttggtagctccagtccacgagtattcactgttgttgttatccgcagatgtctttgatactcgctgctggcggtaacagggtccaggaagccagttcctagactggtcccgaatgtcacttgctccggcctgagaaaactgaagccttgactgcgtggtggttccgcttggagtgtttgttctgctcaagtaatacaggtactggtcgacgagaggattcatgagacggtccaaactctggctgtgggcgtagctgctgtggaaaggaacgtcctcaaaggtgtagctgaaggtaaagttgtttccggtacgcagcatctgagaaggaaagtactccaggcagtaaaatgaagagcgtcctactgcctgactcccgttgttcagggtgaggtatccatactgtggcaccatgaagacgtctgctgggaacggcgggaggcatccttgatgcgccgagccgaggacgtacgggagctggtactccgagtcagtaaacacctgaaccgtgctggtaaggttattggcaatcgtcgtcgtaccgtcattctgcgtgacctccttgacttgaatgttaaagagcttgaagttgagtcttttgggccgggatccccaattgttgttgatgagtctttgccagtcacgtggcgaaaagtggcagtggaatctgttgaagtcaaaatacccccaaggggtgctgtagccaaagtagtggttgtcgtttgaggctcctgattggctggaaatctgcctgtagaggtggttgttgtaggtgggcagagcccaggtgcgggtgctggtggtgatgactctgtcgcccatccatgtggaatcgcaatgccaatttcccgaggaattacccactccgtcggcgccctcgttattgtctgccattggtgcgccactgcctgtagccatcgtattagttcccagaccagagggggctgctggtggctgtccgagaggctgggggtcaggtacggagtctgcgtctccagtctgaccgaaattcaatctccttcttgcaggctgctggcccgcttttccggttcccgaggaggagtctggctccgcaagagagtgctctaccggcctcttttttcccggagccgtcttaacaggttcctcaaccaggcccagaggttcaagaaccctctttttcgcctggaagactgctcgtccgaggttgcccccaaaagacgtatcttctttaagacgctcctggaactccgcgtcggcgtggttgtacttgaggtacgggttgtctccgccgtcgagctgccggtcgtaggccttgtcgtgctcgagggccgcggcgtctgcctcgttgaccggctctcccttgtcgagtccgttgaagggtccaaggtacttgtacccaggaagcacaagacccctgctgtcgtccttatgccgctctgcgggctttggtggtggtgggccaggtttgagcttccaccactgtcttattccttcagagagagtgtcctcgagccaatctggaagataaccatcggcagccatacctgatttaaatcatttattgttcagagatgcagtcatccaaatccacattgaccagatcgcaagcagtgcaagcgtctggcacctttcccatgatatgatgaatgtagcacagtttctgatacgcctttttgacgacagaaacgggttgagattctgacacgggaaagcactctaaacagtctttctgtccgtgagtgaagcagatatttgaattctgattcattctctcgcattgtctgcagggaaacagcatcagattcatgcccacgtgacgagaacatttgttttggtacctgtccgcgtagttgattgaagcttccgcgtctgacgtcgatggctgcgcaactgactcgcgcgcccgtttgggctcacttatatctgcgtcactgggggcgggtctttttttggctccaccctttttgacgtagaattcatgctctacctcaaccacgtgatcctttgcccaccggaaaaagtctttgacttcctgcttggtgaccttcccaaagtcatgatccagacggcgggtgagttcaaatttgaacatccggtcttgcaacggctgctggtgttcgaaggtcgttgagttcccgtcaatcactgcgcacatgttggtgttggaggtgacaatcacgggagtcgggtctatctgggccgaggacttgcatttctggtccacgcgcaccttgcttcctccgagaatggctttggccgactccacgaccttggcggtcatcttcccctcctcccaccagatcaccatcttgtcgacgcaatcattgaaaggaaagttctcattggtccagttgacgcagcaagggcgaattcgtttaaacctgcaggactagtccctttagtgaggg

SEQ ID NO: 213 - DNA, 3172 bp, Artificial Sequence
  source: /note="Description of Artificial Sequence: Synthetic polynucleotide"
gattgaatttagcggccgcgaattcgcccttgctgcgtcaactggaccaatgagaactttcccttcaacgattgcgtcgacaagatggtgatctggtgggaggagggcaagatgaccgccaaggtcgtggagtccgccaaggccattctgggtggaagcaaggtgcgcgtggaccaaaagtgcaagtcatcggcccagatcgaccccacgcccgtgatcgtcacctccaacaccaacatgtgcgccgtgatcgacgggaacagcaccaccttcgagcaccagcagcccctgcaggaccgcatgttcaagttcgagctcacccgccgtctggagcacgactttggcaaggtgaccaagcaggaagtcaaagagttcttccgctgggctcaggatcacgtgactgaggtggcgcatgagttctacgtcagaaagggcggagccaccaaaagacccgcccccagtgacgcggatataagcgagcccaagcgggcctgcccctcagttgcggagccatcgacgtcagacgcggaagcaccggtggactttgcggacaggtaccaaaacaaatgttctcgtcacgcgggcatgcttcagatgctgtttccctgcaagacatgcgagagaatgaatcagaatttcaacgtctgcttcacgcacggggtcagagactgctcagagtgcttccccggcgcgtcggaatctcaacccgtcgtcagaaaaaagacgtatcagaaactgtgcgcgattcatcatctgctggggcgggcacccgagattgcgtgttcggcctgcgatctcgtcaacgtggacttggatgactgtgtttctgagcaataaatgacttaaaccaggtatggctgctgacggttatcttccagattggctcgaggacaacctctctgagggcattcgcgagtggtgggacctgaaacctggagcccccaagcccaaggccaaccagcagaagcaggacgacggccggggtctggtgcttcctggctacaagtacctcggacccttcaacggactcgacaagggggagcccgtcaacgcggcggacgcagcggccctcgagcacgacaaggcctacgaccagcagctcaaagcgggtgacaatccgtacctgcggtataaccacgccgacgccgagtttcaggagcgtctgcaagaagatacgtcttttgggggcaacctcgggcgagcagtcttccaggccaagaagcgggttctcgaacctctcggtctggttgaggaagctgctaagacggctcctggaaagaagagaccggtagaaccgtcacctcagcgttcccccgactcctccgcgggcatcggcaagaaaggccagcagcccgctaaaaagagactgaactttggtcagactggcgactcagagtcagtccccgaccctcaaccaatcggagaaccaccagcaggcccctctggtctgggatctggtacaatggctgcaggcggtggcgctccaatggcagacaataacgaaggcgccgacggagtgggtagttcctcaggaaattggcattgcgattccacatggctgggcgacagagtcatcaccaccagcacccgaacctgggccctgcccacctacaacaaccacctctacaagcaaatatccaatgggacatcgggaggaagcaccaacgacaacacctacttcggctacagcaccccctgggggtattttgacttcaacagattccactgccacttctcaccacgtgactggcagcgactcatcaacaacaactggggattccggccaaaaagactcagcttcaagctcttcaacatccaggtcaaggaggtcacgcagaatgaaggcaccgagaccatcgccaataaccttaccagcacgattcaggtatttacggactcggaataccagctgccgtacgtcctcggctccgcgcaccagggctgcctgcctccgttcccggcggacgtcttcatgattccccagtacggctaccttacactgaacaatggaagtcaagccgtaggccgttcctccttctactgcctggaatattttccatctcaaatgctgcgaactggaaacaattttgaattcagctacaccttcgaggacgtgcctttccacagcagctgcgcacacagccagagctcggaccgactgatgaatcctctcatcgaccagtacctgtactacttatccagaactcggtccacaggaggaactcaaggtacccagcaattgttattttctcaagctgggcctgcaaacatgtcggctcaggctaagaactggctacctggaccttgctaccggcagcagcgagtctctacgacactgtcgcaaaacaacaacagcaactttgcttggactggtgccaccaaatatcacctgaacggaagagactctttggtaaatcccggtgtcgccatggcaacccacaaggacgacgaggaacgcttcttcccgtcgagtggagtcctgatgtttggaaaacagggtgctggaagagacaatgtggactacagcagcgttatgctaaccagcgaagaagaaattaaaaccactaaccctgtagccacagaacaatacggtgtggtggctgacaacttgcagcaaaccaatacagggcctattgtgggaaatgtcaacagccaaggagccttacctggcatggtctggcagaaccgagacgtgtacctgcagggtcccatctgggccaagattcctcacacggacggcaacttccacccttcaccgctaatgggaggatttggactgaagcacccacctcctcagatcctgatcaagaacacgccggtacctgcggatcctccaacaacgttcagccaggcgaaattggcttccttcattacgcagtacagcaccggacaggtcagcgtggaaatcgagtgggagctgcagaaggagaacagcaaacgctggaacccagagattcagtacacttcaaactactacaaatctacaaatgtggactttgctgtcaatacagagggaacttattctgagcctcgccccattggtactcgttacctcacccgtaatctgtaattgctggttaatcaataaaccgtttgattcgtttcagttgaactttggtctctgcgaagggcgaattcgtttaaacctgcaggactagtccctttagtgagg

SEQ ID NO: 214 - DNA, 3172 bp, Artificial Sequence
  source: /note="Description of Artificial Sequence: Synthetic polynucleotide"
gattgaatttagcggccgcgaattcgcccttgctgcgtcaactggaccaatgagaactttcccttcaacgattgcgtcgacaagatggtgatctggtgggaggagggcaagatgaccgccaaggtcgtggagtccgccaaggccattctgggtggaagcaaggtgcgcgtggaccaaaagtgcaagtcatcggcccagatcgaccccacgcccgtgatcgtcacctccaacaccaacatgtgcgccgtgatcggcgggaacagcaccaccttcgagcaccagcagcccctgcaggaccgcatgttcaagttcgagctcacccgccgtctggagcacgactttggcaaggtgaccaagcaggaagtcaaagagttcttccgctgggctcaggatcacgtgactgaggtggcgcatgagttctacgtcagaaagggcggagccaccaaaagacccgcccccagtgacgcggatataagcgagcccaagcgggcctgcccctcagttgcggagccatcgacgtcagacgcggaagcaccggtggactttgcggacaggtaccaaaacaaatgttctcgtcacgcgggcatgcttcagatgctgtttccctgcaagacatgcgagagaatgaatcagaatttcaacgtctgcttcacgcacggggtcagagactgctcagagtgcctccccggcgcgtcagaatctcaacccgtcgtcagaaaaaagacgtatcagaaactgtgcgcgattcatcatctgctggggcgggcacccgagattgcgtgttcggcctgcgatctcgtcaacgtggacttggatgactgtgtttctgagcaataaatgacttaaaccaggtatggctgctgacggttatcttccagattggctcgaggacaacctctctgagggcattcgcgagtggtgggacctgaaacctggagcccccaagcccaaggccaaccagcagaagcaggacgacggccggggtctggtgcttcttggctacaagtacctcggacccttcaacggactcgacaagggggagcccgtcaatgcggcggacgcagcggccctcgagcacgacaaggcctacgaccagcagctcaaagcgggtgacaatccgtacctgcggtataaccacgccgacgccgagtttcaggagcgtctgcaagaagatacgtcttttgggggcaacctcgggcgagcagtcttccaggccaagaagcgggttctcgaacctctcggtctggttgaggaagctgctaagacggctcctggaaagaagagaccggtagaaccgtcacctcagcgttcccccgactcctccacgggcatcggcaagaaaggccagcagcccgctaaaaagagactgaactttggtcagactggcgactcagagtcagtccccgaccctcaaccaatcggagaaccaccagcaggcccctctggtctgggatctggtacaatggctgcaggcggtggcgctccaatggcagacaataacgaaggcgccgacggagtgggtagttcctcaggaaattggcattgcgattccacatggctgggcgacagagtcatcaccaccagcacccgaacctgggccctgcccacctacaacaaccacctctacaagcaaatatccaatgggacatcgggaggaagcaccaacgacaacacctacttcggctacagcaccccctgggggtattttgacttcaacagattccactgccacttctcaccacgtgactggcagcgactcatcaacaacaactggggattccggccaaaaagactcagcttcaagctcttcaacatccaggtcaaggaggtcacgcagaatgaaggcaccaagaccatcgccaataaccttaccagcacgattcaggtatttacggactcggaataccagctgccgtacgtcctcggctccgcgcaccagggctgcctgcctccgttcccggcggacgtcttcatgattccccagtacggctaccttacactgaacaatggaagtcaagccgtaggccgttcctccttctactgcctggaatattttccatctcaaatgctgcgaactggaaacaattttgaattcagctacaccttcgaggacgtgcctttccacagcggctacgcacacagccagagcttggaccgactgatgaatcctctcatcgaccagtacctgtactacttatccagaactcagtccacaggaggaactcaaggtacccagcaattgttattttctcaagctgggcctgcaaacatgtcggctcaggctaagaactggctacctggaccttgctaccggcagcagcgagtctctacgacactgtcgcaaaacaacaacagcaactttgcttggactggtgccaccaaatatcacctgaacggaagagactctttggtaaatcccggtgtcgccatggcaacccacaaggacgacgaggaacgcttcttcccgtcgagtggagtcctgatgtttggaaaacagggtgctggaagagacaatgtggactacagcagcgttatgctaaccagcgaagaagaaattaaaaccactaaccctgtagccacagaacaatacggtgtggtggctgacaacttgcagcaaaccaatacagggcctattgtgggaaatgtcaacagccaaggagccttacctggcatggtctggcagaaccgagacgtgtacctgcagggtcccatctgggccaagattcctcacacggacggcaacttccacccttcaccgctaatgggaggatttggactgaagcacccacctcctcagatcctgatcaagaacacgccggtacctgcggatcctccaacgacgttcagccaggcgaaattggcttccttcattacgcagtacagcaccggacaggtcagcgtggaaatcgagtgggagctgcagaaggagaacagcaaacgctggaacccagagattcagtacacttcaaactactacaaatctacaaatgtggactttgctgtcaatacagagggaacttattctgagcctcgccccattggtactcgttacctcacccgtaatctgtaattgctggttaatcaataaaccgtttgattcgtttcagttgaactttggtctctgcgaagggcgaattcgtttaaacctgcaggactagtccctttagtgagg

SEQ ID NO: 215 - DNA, 2208 bp, Artificial Sequence
  source: /note="Description of Artificial Sequence: Synthetic polynucleotide"
atggctgccgatggttatcttccagattggctcgaggacactctctctgaaggaataagacagtggtggaagctcaaacctggcccaccaccaccaaagcccgcagagcggcataaggacgacagcaggggtcttgtgcttcctgggtacaagtacctcggacccttcaacggactcgacaagggagagccggtcaacgaggcagacgccgcggccctcgagcacgacaaggcctacgaccggcagctcgaaagcggagacaacccgtacctcaagtacaaccacgccgacgcggagtttcaggagcgtcttaaagaagatacgtcttttgggggcaacctcggacgagcagtcttccaggcgaaaaagagggttcttgaacctctgggcctggttgaggagcctgttaaaacggctccgggaaaaaagaggccggtagagcactctcctgtggagccagactcctcctcgggaaccggaaaagcgggccagcagcctgcgagaaaaagattgaattttggtcagactggagacgcagactccgtacctgacccccagcctctcggacagccaccagcagccccctctggtctgggatctactacaatggcttcaggcagtggcgcaccagtggcagacaataacgagggtgccgatggagtgggtaattcctcaggaaattggcattgcgattcccaatggctgggcgacagagtcatcaccaccagcacccgaacctgggccctgcccacctacaacaaccacctctacaagcaaatctccagccaatcaggagcctcaaacgacaaccactactttggctacagcaccccctgggggtattttgacttcaacagattccactgccacttttcaccacgtgactggcaaagactcatcaacaacagctggggattccgacccaaaagactcaacttcaagctctttaacattcaagtcaaagaggtcacgcagaatgacggtacgacgacgattgccaataaccttaccagcacggttcaagtgtttaccgactcggagtaccagctcccgtacgtcctcggctcggcgcatcaaggatgcctcccgccgttcccagcagacgtctttatggtcccacagtatggatacctcaccctgaacaacgggagtcaggcggtaggacgctcttccttttactgcctggagtactttccttctcagatgctgcgtactggaaacaactttcagttcagctacacctttgaagacgttcccttccacagcagctacgctcacagccagagtctggatcggctgctgaatcctctgatcgaccagtacctatattatctgaacaagacacaatcaaatagtggaactcttcagcagtctcggctactgtttagccaagctggacccaccagcatgtctcttcaagctaaaaactggctgcctggaccttgctacagacagcagcgtctgtcaaagcaggcaaacgacaacaacaacagcaactttccctggactgcggctacaaagtatcatctaaatggccgggactcgttggttaatccaggaccagctatggccagccacaaagacgatgaagaaaagtttttccccatgcatggaaccctgatatttggtaaacaaggaacaaatgctaacgacgcggatttggacaatgtcatgattacagatgaagaagaaatccgcaccaccaatcccgtggctacggagcagtacggatatgtgtcaaataatttgcaaaactcaaatactggtccaactactggaactgtcaatcaccaaggagcgttacctggtatggtgtggcaggatcgagacgtgtacctgcagggacccatttgggccaagattcctcacacggacgggcactttcatccttctccactaatgggaggttttgggctcaaacacccgcctcctcagatcatgatcaaaaacactcccgttccagccaatcctcctacaaacttcagttcttccaagtttgcttctttcatcacacagtattccacggggcaggtcagcgtggagatcgagtgggagctgcagaaggagaacagcaaacgctggaatcccgaaattcagtatacttccaactacaacaaatctgttaatgtggactttactgtggacactaatggtgtgtattcagagcctcgccccattggcaccagatacccgactcgtaatctgtaa

SEQ ID NO: 216 - protein, 735 aa, Artificial Sequence
  source: /note="Description of Artificial Sequence: Synthetic polypeptide"
MAADGYLPDWLEDTLSEGIRQWWKLKPGPPPPKPAERHKDDSRGLVLPGYKYLGPFNGLDKGEPVNEADAAALEHDKAYDRQLESGDNPYLKYNHADAEFQERLKEDTSFGGNLGRAVFQAKKRVLEPLGLVEEPVKTAPGKKRPVEHSPVEPDSSSGTGKAGQQPARKRLNFGQTGDADSVPDPQPLGQPPAAPSGLGSTTMASGSGAPVADNNEGADGVGNSSGNWHCDSQWLGDRVITTSTRTWALPTYNNHLYKQISSQSGASNDNHYFGYSTPWGYFDFNRFHCHFSPRDWQRLINNSWGFRPKRLNFKLFNIQVKEVTQNDGTTTIANNLTSTVQVFTDSEYQLPYVLGSAHQGCLPPFPADVFMVPQYGYLTLNNGSQAVGRSSFYCLEYFPSQMLRTGNNFQFSYTFEDVPFHSSYAHSQSLDRLLNPLIDQYLYYLNKTQSNSGTLQQSRLLFSQAGPTSMSLQAKNWLPGPCYRQQRLSKQANDNNNSNFPWTAATKYHLNGRDSLVNPGPAMASHKDDEEKFFPMHGTLIFGKQGTNANDADLDNVMITDEEEIRTTNPVATEQYGYVSNNLQNSNTGPTTGTVNHQGALPGMVWQDRDVYLQGPIWAKIPHTDGHFHPSPLMGGFGLKHPPPQIMIKNTPVPANPPTNFSSSKFASFITQYSTGQVSVEIEWELQKENSKRWNPEIQYTSNYNKSVNVDFTVDTNGVYSEPRPIGTRYPTRNL

SEQ ID NO: 217 - DNA, 2208 bp, Artificial Sequence
  source: /note="Description of Artificial Sequence: Synthetic polynucleotide"
atggctgccgatggttatcttccagattggctcgaggacactctctctgaaggaataagacagtggtggaagctcaaacctggcccaccaccaccaaagcccgcagagcggcataaggacgacagcaggggtcttgtgcttcctgggtacaagtacctcggacccttcaacggactcgacaagggagagccggtcaacgaggcagacgccgcggccctcgagcacgacaaggcctacgaccggcagctcgacagcggagacaacccgtacctcaagtacaaccacgccgacgcggagtttcaggagcgtcttaaagaagatacgtcttttgggggcaacctcggacgagcagtcttccaggccaaaaagaggattcttgaacctctgggcctggttgaggaacctgttaagacggctccgggagaaaagaggccggtagagcactctcctgcggagccagactcctcctcgggaaccggaaaagcgggccagcagcctgcaagaaagagattgaattttggccagactggagacgcagactcagtacctgacccccagcctctcggacagccaccagcagccccctctggtctgggaactaatacgatggcttcaggcagtggcgcaccaatggcagacaataacgagggcgccgacggagtgggtaattcctcgggaaattggtattgcgattccacatggatgggcgacagagtcatcaccaccagcacccgcacctgggccctgcccacctacaacaaccatctgtacaagcaaatctccagccagtctggagccagcaacgacaaccactactttggctacagcaccccctgggggtattttgacttcaacagattccactgccacttctccccacgtgactggcaaagactcatcaacaacaactggggattccggcccaagagactcagcttcaagctctttaacattcaagtcaaagaggtcacgcagaatgacggtacgacgacgattgccaataaccttaccagcacggttcaggtgtttactgactcggagtaccagctcccgtacgtcctcggctcggcgcatcaaggatgcctcccgccgttcccagcagacgtcttcatggtgccacagtatggatacctcaccctgaacaacggcagtcaggcggtaggacgctcttccttttactgcctggagtactttccttctcagatgcttcgtaccggaaacaactttaccttcagctacacctttgaagacgttcctttccatagcagctacgctcacagccaaagtctggaccgtctcatgaatcctctcatcgaccagtacctgtattacttgagcagaacaaacactccaagcggaaccaccacgatgtccaggcttcagttttctcaggccggagcaagtgacattcgggaccagtctagaaactggcttcctggaccctgttaccgccagcagcgagtatcaaagacagctgcggacaacaacaacagtgattactcgtggactggagctaccaagtaccacctcaatggaagagactctctggtgaatccgggcccagctatggccagccacaaggacgatgaagaaaaatattttcctcagagcggggttctcatctttggaaaacaagactcgggaaaaactaatgtggacattgaaaaggttatgattacagacgaagaggaaatcaggaccaccaatcccgtggctacggagcagtatggttctgtatctaccaacctccagagcggcaacacacaagcagctacctcagatgtcaacacacaaggcgttcttccaggcatggtctggcaggacagagacgtgtacctgcaggggcccatctgggcaaagattccacacacggacggacattttcacccctctcccctcgtgggcggattcggacttaaacaccctcctccacaaattctcatcaagaacaccccggtacctgcgaatccttcgaccactttcagtgcggcaaagtttgcttccttcatcacacagtactccacggggcaggtcagcgtggagatcgagtgggagctgcagaaggagaacagcaaacgctggaatcccgaaattcagtacacttccaactacaacaaatctgttaatgtggactttactgtggacactaatggtgtgtattcagagcctcgccccattggcaccagatacctgactcgtaatctgtaa

SEQ ID NO: 218 - protein, 735 aa, Artificial Sequence
  source: /note="Description of Artificial Sequence: Synthetic polypeptide"
MAADGYLPDWLEDTLSEGIRQWWKLKPGPPPPKPAERHKDDSRGLVLPGYKYLGPFNGLDKGEPVNEADAAALEHDKAYDRQLDSGDNPYLKYNHADAEFQERLKEDTSFGGNLGRAVFQAKKRILEPLGLVEEPVKTAPGEKRPVEHSPAEPDSSSGTGKAGQQPARKRLNFGQTGDADSVPDPQPLGQPPAAPSGLGTNTMASGSGAPMADNNEGADGVGNSSGNWYCDSTWMGDRVITTSTRTWALPTYNNHLYKQISSQSGASNDNHYFGYSTPWGYFDFNRFHCHFSPRDWQRLINNNWGFRPKRLSFKLFNIQVKEVTQNDGTTTIANNLTSTVQVFTDSEYQLPYVLGSAHQGCLPPFPADVFMVPQYGYLTLNNGSQAVGRSSFYCLEYFPSQMLRTGNNFTFSYTFEDVPFHSSYAHSQSLDRLMNPLIDQYLYYLSRTNTPSGTTTMSRLQFSQAGASDIRDQSRNWLPGPCYRQQRVSKTAADNNNSDYSWTGATKYHLNGRDSLVNPGPAMASHKDDEEKYFPQSGVLIFGKQDSGKTNVDIEKVMITDEEEIRTTNPVATEQYGSVSTNLQSGNTQAATSDVNTQGVLPGMVWQDRDVYLQGPIWAKIPHTDGHFHPSPLVGGFGLKHPPPQILIKNTPVPANPSTTFSAAKFASFITQYSTGQVSVEIEWELQKENSKRWNPEIQYTSNYNKSVNVDFTVDTNGVYSEPRPIGTRYLTRNL

SEQ ID NO: 219 - DNA, 2209 bp, Artificial Sequence
  source: /note="Description of Artificial Sequence: Synthetic polynucleotide"
atggctgccgatggttatcctccagattggctcgaggacactctctctgaagggataagacagtggtggaagctcaaacctggcccaccaccaccaaagcccgcagagcggcataaggacgacagcaggggtcttgtgcttcctgggtacaagtacctcggacccttcaacggactcgacaagggggagccggtcaacgaggcagacgccgcggccctcgagcacgacaaggcctacgaccggcagctcgacagcggagacaacccgtacctcaagtacaaccacgccgacgcagagtttcaggagcgccttaaagaagatacgtcttttgggggcaacctcggacgagcagtcttccaggcgaaaaagagggttcttgaacctctgggcctggttgaggaacctgttaagacggctccgggaaaaaagaggccggtagagcactctcctgtggagccagactcctcctcgggaaccggaaaagcgggccagcggcctgcaagaaaaagattaaattttggtcagactggagacgcagactccgtacctgacccccagcctctcggacagccaccagcagccccctctggtctgggatctactacaatggctacaggcagtggcgcaccaatggcagacaataacgagggtgccgatggagtgggtaattcctcaggaaattggcattgcgattcccaatggctgggcgacagagtcatcaccaccagcacccgaacctgggccctgcccacatacaacaaccacctctacaagcaaatctccagccaatcaggagccagcaacgacaaccactactttggctacagcaccccctgggggtattttgacttcaacagattccactgccacttttcaccacgtgactggcaaagactcatcaacaacaactggggattccggcccaaaagactcaacttcaagctctttaatattcaagtcaaagaggtcacgcagaatgacggtacgacgacgattgccaataaccttaccagcacggttcaggtgtttactgactcggagtaccagctcccgtacgtcctgggctcggcgcatcaaggatgcctcccgccgtttccagcggacgtcttcatggtcccacagtatggatacctcaccctgaacaacgggagtcaggcggtaggacgctcttccttttactgcctggagtactttccttctcagatgctgcgtactggaaacaactttcagttcagctacacttttgaagacgtgcctttccacagcagctacgctcacagccagagtctggatcggctgatgaatcctctgatcgaccagtacctgtattatctgaacaagacacaaacaaatagtggaactcttcagcagtctcggctactgtttagccaagctggaccaaccaacatgtctcttcaagctaaaaactggctgcctggaccttgctacagacagcagcgtctgtcaaaacaggcaaacgacaacaacaacagcaactttccctggactgcagctacaaagtatcatctaaatggccgggactcgttggttaatccaggaccagctatggccagtcacaaggatgacgaagaaaagtttttccccatgcatggaaccctgatatttggtaaacaaggaacaaatgccaacgacgcggatttggaaaatgtcatgattacagatgaagaagaaatcagggccaccaatcccgtggctacggagcagtacgggactgtgtcaaataatttgcaaaactcaaacactggtccaactactggaactgtcaatcgccaaggagcgttacctggtatggtgtggcaggatcgagacgtgtacctgcagggacccatttgggccaagattcctcacaccgatggacactttcatccttctccactgatgggaggttttggactcaaacacccgcctcctcagatcatgatcaaaaacactcccgttccagccaatcctcccacaaacttcagttctgccaagtttgcttctttcatcacacagtattccacgggacaggtcagcgtggagatcgagtgggagctgcagaaggagaacagcaaacgctggaatcccgaaattcagtacacttccaactacaacaagtctgttaatgtggactttactgtggacactaatggtgtgtattcagagcctcgccccattggcaccagatacctgactcgtaatctgtaat

SEQ ID NO: 220 - protein, 735 aa, Artificial Sequence
  source: /note="Description of Artificial Sequence: Synthetic polypeptide"
MAADGYPPDWLEDTLSEGIRQWWKLKPGPPPPKPAERHKDDSRGLVLPGYKYLGPFNGLDKGEPVNEADAAALEHDKAYDRQLDSGDNPYLKYNHADAEFQERLKEDTSFGGNLGRAVFQAKKRVLEPLGLVEEPVKTAPGKKRPVEHSPVEPDSSSGTGKAGQRPARKRLNFGQTGDADSVPDPQPLGQPPAAPSGLGSTTMATGSGAPMADNNEGADGVGNSSGNWHCDSQWLGDRVITTSTRTWALPTYNNHLYKQISSQSGASNDNHYFGYSTPWGYFDFNRFHCHFSPRDWQRLINNNWGFRPKRLNFKLFNIQVKEVTQNDGTTTIANNLTSTVQVFTDSEYQLPYVLGSAHQGCLPPFPADVFMVPQYGYLTLNNGSQAVGRSSFYCLEYFPSQMLRTGNNFQFSYTFEDVPFHSSYAHSQSLDRLMNPLIDQYLYYLNKTQTNSGTLQQSRLLFSQAGPTNMSLQAKNWLPGPCYRQQRLSKQANDNNNSNFPWTAATKYHLNGRDSLVNPGPAMASHKDDEEKFFPMHGTLIFGKQGTNANDADLENVMITDEEEIRATNPVATEQYGTVSNNLQNSNTGPTTGTVNRQGALPGMVWQDRDVYLQGPIWAKIPHTDGHFHPSPLMGGFGLKHPPPQIMIKNTPVPANPPTNFSSAKFASFITQYSTGQVSVEIEWELQKENSKRWNPEIQYTSNYNKSVNVDFTVDTNGVYSEPRPIGTRYLTRNL

SEQ ID NO: 221 - DNA, 2208 bp, Artificial Sequence
  source: /note="Description of Artificial Sequence: Synthetic polynucleotide"
atggctgccgatggttatcttccagattggctcgaggacactctctctgaaggaataagacagtggtggaagctcaaacctggcccaccaccaccaaagcccgcagagcggcataaggacgacagcaggggtcttgtgcttcctgggtacaggtacctcggacccttcaacggactcgacaagggagagccggtcaacgaggcagacgccgcggccctcgagcacgacaaggcctacgaccggcagctcgacagcggagacaacccgtacctcaagtacaaccacgtcgacgcggagtttcaggagcgtcttaaagaagatacgtcttttgggggcaacctcggacgagcagtcttccaggccaaaaagaggattcttgaacctctgggcctggttgaggaacctgttaaggcggctccgggagaaaagaggccggtagagcactctcctgcggagccagactcctcctcgggaaccggaaaagcgggccagcagcctgcaagaaagagattgaattttggtcagactggagacgcagactcagtacctgacccccagcctctcggacagccaccagcagccccctctggtctgggaactaatacgatggcttcaggcagtggcgcaccaatggcagacaataacgagggcgccgacggagtgggtaattcctcgggaaattggcattgcgattccacatggatgggcgacagagtcatcaccaccagcacccgcacctgggccctgcccacctacaacaaccatctgtacaagcaaatctccagccagtctggagccagcaacgacaaccactactttggctacagcaccccctgggggcattttgacttcaacagattccactgccacttctccccacgtgactggcaaagactcatcaacaacaactggggattccggcccaagagactcagcttcaagctctttaacattcaagtcaaagaggtcacgcagaatgacggtacgacgacgattgccaataaccttaccagcacggttcaggtgtttactgactcggagtaccagctcccgtacgtcctcggctcggcgcatcaaggatgcctcccgccgttcccagcagacgtcttcatggtgccacagtatggatacctcaccctgaacaacggcagtcaggcggtaggacgctcttccttttactgcctggagtactttccttctcagatgcttcgtaccggaaacaactttaccttcagctacacctttgaagacgttcctttccatagcagctacgctcacagccaaagtctggaccgtctcatgaatcctctcatcgaccagtacctgtattacttgagcagaacaaacactccaagcggaaccaccacgatgtccaggcttcagttttctcaggccggagcaagtgacattcgggaccagtctagaaactggcttcctggaccctgttaccgccagcagcgagtatcaaagacagctgcggacaacaacaacagtgattactcgtggactggagctaccaagtaccacctcaatggaagagactctctggtgaatccgggcccagctatggccagccacaaggacgatgaagaaaaatattttcctcagagcggggttctcatctttggaaaacaagactcgggaaaaactaatgtggacattgaaaaggttatgattacagacgaagaggaaatcaggaccaccaatcccgtggctacggagcagtatggttctgtatctaccaacctccagagcggcaacacacaagcagctacctcagatgtcaacacacaaggcgttcttccaggcatggtctggcaggacagagacgtgtacctgcaggggcccatctgggcaaagattccacacacggacggacattttcacccctctccccccatgggcggattcggacttaaacaccctcctccacaaattctcatcaagaacaccccggtacctgcgaatccttcgaccactttcagtgcggcaaagtttgcttccttcatcacacagtactccacggggcaggtcagcgtggagatcgagtgggagctgcagaaggagaacagcaaacgctggaatcccgaaattcagtacacttccaactacaacaaatctgttaatgtggactttactgtggacactaatggtgtgtattcagagcctcgccccattggcgccagatacctgactcgtaatctgtaa

SEQ ID NO: 222 - protein, 735 aa, Artificial Sequence
  source: /note="Description of Artificial Sequence: Synthetic polypeptide"
MAADGYLPDWLEDTLSEGIRQWWKLKPGPPPPKPAERHKDDSRGLVLPGYRYLGPFNGLDKGEPVNEADAAALEHDKAYDRQLDSGDNPYLKYNHVDAEFQERLKEDTSFGGNLGRAVFQAKKRILEPLGLVEEPVKAAPGEKRPVEHSPAEPDSSSGTGKAGQQPARKRLNFGQTGDADSVPDPQPLGQPPAAPSGLGTNTMASGSGAPMADNNEGADGVGNSSGNWHCDSTWMGDRVITTSTRTWALPTYNNHLYKQISSQSGASNDNHYFGYSTPWGHFDFNRFHCHFSPRDWQRLINNNWGFRPKRLSFKLFNIQVKEVTQNDGTTTIANNLTSTVQVFTDSEYQLPYVLGSAHQGCLPPFPADVFMVPQYGYLTLNNGSQAVGRSSFYCLEYFPSQMLRTGNNFTFSYTFEDVPFHSSYAHSQSLDRLMNPLIDQYLYYLSRTNTPSGTTTMSRLQFSQAGASDIRDQSRNWLPGPCYRQQRVSKTAADNNNSDYSWTGATKYHLNGRDSLVNPGPAMASHKDDEEKYFPQSGVLIFGKQDSGKTNVDIEKVMITDEEEIRTTNPVATEQYGSVSTNLQSGNTQAATSDVNTQGVLPGMVWQDRDVYLQGPIWAKIPHTDGHFHPSPPMGGFGLKHPPPQILIKNTPVPANPSTTFSAAKFASFITQYSTGQVSVEIEWELQKENSKRWNPEIQYTSNYNKSVNVDFTVDTNGVYSEPRPIGARYLTRNL

SEQ ID NO: 223 - DNA, 2208 bp, Artificial Sequence
  source: /note="Description of Artificial Sequence: Synthetic polynucleotide"
atggctgccgatggttatcttccagattggctcgaggacaccctctctgaaggaataagacagtggtggaagctcaaacctggcccaccaccaccaaagcccgcagagcggcataaggacgacagcaggggtcttgtgcttcctgggtacaagtacctcggacccttcaacggactcgacaagggagagccggtcaacgaggcagacgccgcggccctcgagcacgacaaggcctacgaccggcagctcgacagcggagataacccgtacctcaagtacaaccacgccgacgcggagtttcaggagcgccttaaagaggatacgtcttttgggggcaacctcggacgagcagtcttccaggccaaaaagaggattcttgaacctctgggcctggttgaggaacctgttaagacggctccgggaaaaaagaggccggtagagcactctcctgcggagccagactcctcctcgggaaccggaaaagcgggccagcagcctgcaagaaagagattgaattttggtcagactggagacgcagactcagtacctgacccccggcctctcggacagccaccagcagccccctctggtctgggaactaatacgatggcttcaggcagtggcgcaccaatggcagacaataacgagggcgccgacggagtgggtaattcctcgggaaattggcattgcgattccacatggatgggcgacagagtcatcaccaccagcacccgcacctgggccctgcccacctacaacaaccatctgtacaagcaaatctccagccagtctggagccagcaacgacaaccactactttggctacagcaccccctgggggtattttgacttcaacagattccactgccacttctccccacgtgactggcaaagactcatcaacaacaactggggattccggcccaagagactcagcttcaagctctttaacattcaagtcaaagaggtcacgcagaatgacggtacgacgacgattgccaataaccttaccagcacggttcaggtgtttactgactcggagtaccagctcccgtacgtcctcggctcggcgcatcaaggatgcctcccgccgttcccagcagacgtcttcatggtgccacagtatggatacctcaccctgaacaacggcagtcaggcggtaggacgctcttccttttactgcctggagtactttccttctcagatgcttcgtaccggaaacaactttaccttcagctacacctttgaagacgttcctttccatagcagctacgctcacagccaaagtctggaccgtctcatgaatcctctcatcgaccagtacctgtattacttgagcagaacaaacactccaagcggaaccaccacgatgtccaggcttcagttttctcaggccggagcaagtgacattcgggaccagtctagaaactggcttcctggaccctgttaccgccagcagcgagtatcaaagacagctgcggacaacaacaacagtgattactcgtggactggagctaccaagtaccacctcaatggaagagactctctggtgaatccgggcccagctatggccagccacaaggacgatgaagaaaaatattttcctcagagcggggttctcatctttggaaaacaagactcgggaaaaactaatgtggacattgaaaaggttatgattacagacgaagaggaaatcaggaccaccaatcccgtggctacggagcagtatggttctgtatctaccaacctccagagcggcaacacacaagcagctacctcagatgtcaacacacaaggcgttcttccaggcatggtctggcaggacagagacgtgtacctgcaggggcccatctgggcaaagattccacacacggacggacattttcacccctctcccctcatgggcggattcggacttaaacaccctcctccacaaattctcatcaagaacaccccggtacctgcgaatccttcgaccactttcagtgcggcaaagtttgcttccttcatcacacagtactccacggggcaggtcagcgtggagatcgagtgggagctgcagaaggagaacagcaaacgctggaatcccgaaattcagtacacttccaactacaacaaatctgttaatgtggactttactgtggacactaatggtgtgtattcagagcctcgccccattggcaccagatacctgactcgtaatctgtaa

SEQ ID NO: 224 - protein, 735 aa, Artificial Sequence
  source: /note="Description of Artificial Sequence: Synthetic polypeptide"
MAADGYLPDWLEDTLSEGIRQWWKLKPGPPPPKPAERHKDDSRGLVLPGYKYLGPFNGLDKGEPVNEADAAALEHDKAYDRQLDSGDNPYLKYNHADAEFQERLKEDTSFGGNLGRAVFQAKKRILEPLGLVEEPVKTAPGKKRPVEHSPAEPDSSSGTGKAGQQPARKRLNFGQTGDADSVPDPRPLGQPPAAPSGLGTNTMASGSGAPMADNNEGADGVGNSSGNWHCDSTWMGDRVITTSTRTWALPTYNNHLYKQISSQSGASNDNHYFGYSTPWGYFDFNRFHCHFSPRDWQRLINNNWGFRPKRLSFKLFNIQVKEVTQNDGTTTIANNLTSTVQVFTDSEYQLPYVLGSAHQGCLPPFPADVFMVPQYGYLTLNNGSQAVGRSSFYCLEYFPSQMLRTGNNFTFSYTFEDVPFHSSYAHSQSLDRLMNPLIDQYLYYLSRTNTPSGTTTMSRLQFSQAGASDIRDQSRNWLPGPCYRQQRVSKTAADNNNSDYSWTGATKYHLNGRDSLVNPGPAMASHKDDEEKYFPQSGVLIFGKQDSGKTNVDIEKVMITDEEEIRTTNPVATEQYGSVSTNLQSGNTQAATSDVNTQGVLPGMVWQDRDVYLQGPIWAKIPHTDGHFHPSPLMGGFGLKHPPPQILIKNTPVPANPSTTFSAAKFASFITQYSTGQVSVEIEWELQKENSKRWNPEIQYTSNYNKSVNVDFTVDTNGVYSEPRPIGTRYLTRNL

SEQ ID NO: 225 - DNA, 2208 bp, Artificial Sequence
  source: /note="Description of Artificial Sequence: Synthetic polynucleotide"
atggctgccgatggttatcttccagattggctcgaggacactctctctgaaggaataagacagtggtggaagctcaaacctggcccaccaccaccaaagcccgcagagcggcataaggacgacagcaggggtcttgtgcttcctgggtacaagtacctcggacccttcaacggactcgacaagggagagccggtcaacgaggcagacgccgcggccctcgagcacgacaaggcctacgaccggcagctcgacagcggagacaacccgtacctcaagtacaaccacgccgacgcggagtttcaggagcgccttaaaggagatacgtcttttgggggcaacctcggacgagcagtcttccaggccaaaaagaggattcttgaacctctgggcctggttgaggaacctgttaagacggctccgggaaaaaagaggccggtagagcactctcctgcggagccagactcctcctcgggaaccggaaaagcgggccagcagcctgcaagaaagagattgaattttggtcagactggagacgcagactcagtacctgacccccagcctctcggacagccaccagcagccccctctggtctgggaactaatacgatggcttcaggcagtggcgcaccaatggcagacaataacgagggcgccgacggagtgggtaattcctcgggaaattggcattgcgattccacatggatgggcggcagagtcatcaccaccagcacccgcacctgggccctgcccacctacaacaaccatctgtacaagcaaatctccagccagtctggagccagcaacgacaaccactactttggctacagcaccccctgggggtattttgacttcaacagattccactgccacttctccccacgtgactggcaaagactcatcaacaacaactggggattccggcccaagagactcagcttcaagctctttaacattcaagtcaaagaggtcacgcagaatgacggtacgacgacgattgccaataaccttaccagcacggttcaggtgtttactgactcggagtaccagctcccgtacgtcctcggctcggcgcatcaaggatgcctcccgccgttcccagcagacgtcttcatggtgccacagtatggatacctcaccctgaacaacggcagtcaggcggtaggacgctcttccttttactgcctggagtactttccttctcagacgcttcgtaccggaaacaactttaccttcagctacacctttgaagacgttcctttccatagcagctacgctcacagccaaagtctggaccgtctcatgaatcctctcatcgaccagtacctgtattacttgagcagaacaaacactccaagcggaaccaccacgatgtccaggcttcagttttctcaggccggagcaagtgacattcgggaccagtctagaaactggcttcctggaccctgttaccgccagcagcgagtatcaaagacagctgcggacaacaacaacagtgattactcgtggactggagctaccaagtaccacctcaatggaagagactctctggtgaatccgggcccagctatggccagccacaaggacgatgaagaaaaatattttcctcagagcggggttctcatctttggaaaacaagactcgggaaaaactaatgtggacattgaaaaggttatgattacagacgaagaggaaatcaggaccaccaatcccgtggctacggagcagtatggttctgtatctaccaacctccagagcggcaacacacaagcagctacctcagatgtcaacacacaaggcgttcttccaggcatggtctggcaggacagagacgtgtacctgcaggggcccatctgggcaaagattccacacacggacggacattttcacccctctcccctcatgggcggattcggacttaaacaccctcctccacaaattctcatcaagaacaccccggtacctgcgaatccttcgaccactttcagtgcggcaaagtttgcttccttcatcacacagtactccacggggcaggtcagcgtggagatcgagtgggagctgcagaaggagaacagcaaacgctggaatcccgaaattcagtacacttccaactacaacaaatctgttaatgtggactttactgtggacactaatggtgtgtattcagagcctcgccccattggcaccagatacctgactcgtaatctgtaa

SEQ ID NO: 226 - protein, 735 aa, Artificial Sequence
  source: /note="Description of Artificial Sequence: Synthetic polypeptide"
MAADGYLPDWLEDTLSEGIRQWWKLKPGPPPPKPAERHKDDSRGLVLPGYKYLGPFNGLDKGEPVNEADAAALEHDKAYDRQLDSGDNPYLKYNHADAEFQERLKGDTSFGGNLGRAVFQAKKRILEPLGLVEEPVKTAPGKKRPVEHSPAEPDSSSGTGKAGQQPARKRLNFGQTGDADSVPDPQPLGQPPAAPSGLGTNTMASGSGAPMADNNEGADGVGNSSGNWHCDSTWMGGRVITTSTRTWALPTYNNHLYKQISSQSGASNDNHYFGYSTPWGYFDFNRFHCHFSPRDWQRLINNNWGFRPKRLSFKLFNIQVKEVTQNDGTTTIANNLTSTVQVFTDSEYQLPYVLGSAHQGCLPPFPADVFMVPQYGYLTLNNGSQAVGRSSFYCLEYFPSQTLRTGNNFTFSYTFEDVPFHSSYAHSQSLDRLMNPLIDQYLYYLSRTNTPSGTTTMSRLQFSQAGASDIRDQSRNWLPGPCYRQQRVSKTAADNNNSDYSWTGATKYHLNGRDSLVNPGPAMASHKDDEEKYFPQSGVLIFGKQDSGKTNVDIEKVMITDEEEIRTTNPVATEQYGSVSTNLQSGNTQAATSDVNTQGVLPGMVWQDRDVYLQGPIWAKIPHTDGHFHPSPLMGGFGLKHPPPQILIKNTPVPANPSTTFSAAKFASFITQYSTGQVSVEIEWELQKENSKRWNPEIQYTSNYNKSVNVDFTVDTNGVYSEPRPIGTRYLTRNL

SEQ ID NO: 227 - DNA, 2208 bp, Artificial Sequence
  source: /note="Description of Artificial Sequence: Synthetic polynucleotide"
atggctgccgatggttatcttccagattggctcgaggacactctctctgaaggaataagacagtggtggaagctcaaacctggcccaccaccaccaaagcccgcagagcggcataaggacgacagcaggggtcttgtgcttcctgggtacaagtacctcggacccttcaacggactcgacaagggagagccggtcaacgaggcagacgccgcggccctcgagcacgacaaggcctacgaccggcagctcgacagcggagacaacccgtacctcaagtacaaccacgccgacgcggagtttcaggagcgtcttaaagaagatacgtcttttgggggcaacctcggacgagcagtcttccaggccaaaaagaggattcttgaacctctgggcctggttgaggaacctgttaagacggctccgggaaaaaagaggccggtagagcactctcctgcggagccagactcctcctcgggaaccggaaaagcgggccagcagcctgcaagaaagagattgaattttggtcagactggagacgcagactcagtacctgacccccagcctctcggacagccaccagcagccccctctggtctgggaactaatacgatggcttcaggcagtggcgcaccaatggcagacaataacgagggcgccgacggagtgggtaattcctcgggaaattggcattgcgattccacatggatgggcgacagagtcatcaccaccagcacccgcacctgggccctgcccacctgcaacaaccatctgtacaagcaaatctccagccagtctggagccagcaacgacaaccactactttggctacagcaccccctgggggtattttgacttcaacagattccactgccacttctccccacgtgactggcaaagactcatcaacaacaactggggattccggcccaagagactcagcttcaagctctttaacattcaagtcaaagaggtcacgcagaatgacggtacgacgacgattgccaataaccttaccagcacggttcaggtgtttactgactcggagtaccagctcccgtacgtcctcggctcggcgcatcaaggatgcctcccgccgttcccagcagacgtcttcatggtgccacagtatggatacctcaccctgaacaacggcagtcaggcggtaggacgctcttccttttactgcctggagtattttccttctcagatgcttcgtaccggaaacaactttaccttcagctacacctttgaagacgttcctttccatagcagctacgctcacagccaaagtctggaccgtctcatgaatcctctcatcgaccagtacctgtattacttgagcagaacaaacactccaagcggaaccaccacgatgtccaggcttcagttttctcaggccggagcaagtgacattcgggaccagtctagaaactggcttcctggaccctgttaccgccagcagcgagtatcaaagacagctgcggacaacaacaacagtgattactcgtggactggagctaccaagtaccacctcaatggaagagactctctggtgaatccgggcccagctatggccagccacaaggacgatgaagaaaaatattttcctcagagcggggttctcatctttggaaaacaagactcgggaaaaactaatgtggacattgaaaaggttatgattacagacgaagaggaaatcaggaccaccaatcccgtggctacggagcagtatggttctgtatctacctacctccagagcggcaacacacaagcagctacctcagatgtcaacacacaaggcgttcttccaggcatggtctggcaggacagagacgtgtacctgcgggggcccatctgggcaaagattccacacacggacggacattttcacccctctcccctcatgggcggatttggacttaaacaccctcctccacaaattctcatcaagaacaccccggtacctgcgaatccttcgaccactttcagtgcggcaaagtttgcttccttcatcacacagtactccacggggcaggtcagcgtggagatcgagtgggagctgcagaaggagaacagcaaacgctggaatcccgaaattcagtacacttccaactacaacaaatctgttaatgtggactttactgtggacactaatggtgtgtattcagagcctcgccccattggcaccagatacctgactcgtaatctgtaa

SEQ ID NO: 228 - protein, 735 aa, Artificial Sequence
  source: /note="Description of Artificial Sequence: Synthetic polypeptide"
MAADGYLPDWLEDTLSEGIRQWWKLKPGPPPPKPAERHKDDSRGLVLPGYKYLGPFNGLDKGEPVNEADAAALEHDKAYDRQLDSGDNPYLKYNHADAEFQERLKEDTSFGGNLGRAVFQAKKRILEPLGLVEEPVKTAPGKKRPVEHSPAEPDSSSGTGKAGQQPARKRLNFGQTGDADSVPDPQPLGQPPAAPSGLGTNTMASGSGAPMADNNEGADGVGNSSGNWHCDSTWMGDRVITTSTRTWALPTCNNHLYKQISSQSGASNDNHYFGYSTPWGYFDFNRFHCHFSPRDWQRLINNNWGFRPKRLSFKLFNIQVKEVTQNDGTTTIANNLTSTVQVFTDSEYQLPYVLGSAHQGCLPPFPADVFMVPQYGYLTLNNGSQAVGRSSFYCLEYFPSQMLRTGNNFTFSYTFEDVPFHSSYAHSQSLDRLMNPLIDQYLYYLSRTNTPSGTTTMSRLQFSQAGASDIRDQSRNWLPGPCYRQQRVSKTAADNNNSDYSWTGATKYHLNGRDSLVNPGPAMASHKDDEEKYFPQSGVLIFGKQDSGKTNVDIEKVMITDEEEIRTTNPVATEQYGSVSTYLQSGNTQAATSDVNTQGVLPGMVWQDRDVYLRGPIWAKIPHTDGHFHPSPLMGGFGLKHPPPQILIKNTPVPANPSTTFSAAKFASFITQYSTGQVSVEIEWELQKENSKRWNPEIQYTSNYNKSVNVDFTVDTNGVYSEPRPIGTRYLTRNL

SEQ ID NO: 229 - DNA, 2208 bp, Artificial Sequence; identical to SEQ ID NO: 223
  source: /note="Description of Artificial Sequence: Synthetic polynucleotide"

SEQ ID NO: 230 - protein, 735 aa, Artificial Sequence; identical to SEQ ID NO: 224
  source: /note="Description of Artificial Sequence: Synthetic polypeptide"

SEQ ID NO: 231 - DNA, 2208 bp, Artificial Sequence
  source: /note="Description of Artificial Sequence: Synthetic polynucleotide"
atggctgccgatggttatcttccagattggctcgaggacactctctctgaaggaataagacagtggtggaagctcaaacctggcccaccaccaccaaagcccgcagagcggcataaggacggcagcaggggtcttgtgcttcctgggtacaagtacctcggacccttcaacggactcgacaagggagagccggtcaacgaggcagacgccgcggccctcgagcacgacaaggcctacgaccggcagctcaacagcggagacaacccgtacctcaagtacaaccacgccgacgcggagtttcaggagcgccttaaagaagatacgtcttttgggggcaacctcggacgagcagtcttccaggcaaaaaagagggttcttgaacctctgggcctggttgaggagcctgttaaaacggctccgggaaaaaagagaccggtagagcactctcctgcggagccagactcctcctcgggaaccggaaaagcgggccagcagcctgcaagaaagagattgaattttggtcagactggagacgcagactccgtacctgacccccagcctctcggacagccaccagcagccccctctggtctgggatctactacaatggctacaggcagtggcgcaccaatggcagacaataacgagggtgccgatggagtgggtaattcctcaggaaattggcattgcgattcccaatggctgggcgacagagtcatcaccacaagcactcgaacctgggccctgcccacctacaacaaccacctctacaagcaaatctccagccaatcaggagcctcaaacgacaaccactattttggctacagcaccccttgggggtattttgacttcaacagattccactgccacttttcaccacgtgactggcaaagactcatcaacaacaactggggattccgacccaagagactcaacttcaagctctttaacattcaagtcaaagaggtcacgcagaatgacggtacgacgacgattgccaataaccttaccagcacggttcaggtgtttactgactcggagtaccagctcccgtacgtcctcggctcggcgcatcaaggatgcctcccgccgttcccagcggacgtcttcatggtcccacagtatggatacctcaccctgaacaacgggagtcaggcggtaggacgctctcccttttactgcctggagtactttccttctcagatgctgcgtactggaaacaactttcagttcagctacacttttgaagacgtgcctttccacagcagctacgctcacagccagagtctggatcggctgatgaatcctctgatcgaccagtacctgtattatctgaacaagacacaaacaaatagtggaactcttcagcagtctcggctactgtttagccaagctggacccaccaacatgtctcttcaagctaaaaactggctgcctggaccttgctacagacagcagcgtctgtcaaagcaggcaaacgacaacaacaacagcaactttccctggactgcagctacaaagtatcatctaaatggccgggactcgttggttaatccaggaccagctatggccagtcacaaggatgacgaagaaaagtttttccccatgcatggaaccctgatatttggtaaacaaggaacaaatgccaacgacgcggatttggaaaatgtcatgattacagatgaagaagaaatcaggaccaccaatcccgtggctacggagcagtacgggactgtgtcaaataatttgcaaaactcaaacactggtccaactactggaactgtcaatcaccaaggagcgttacctggtatggtgtggcaggatcgagatgtgtaccttcagggacccatttgggccaagattcctcacaccgatggacactttcatccttctccactgatgggaggttttggactcaaacacccgcctcctcagattatgatcaaaaacactcccgttccagccaatcctcctacaaacttcagttctgccaagtttgcttctttcatcacacagtattccacggggcaggtcagcgtggagatcgagtgggagctgcagaaggagaacagcaaacgctggaatcccgaaattcagtacacttccaactacaacaaatctgttaatgtggactttactgtggacaataatggcgtgtactcagagcctcgccccattggcaccagatacctgactcgtaatctgtaa

SEQ ID NO: 232 - protein, 735 aa, Artificial Sequence
  source: /note="Description of Artificial Sequence: Synthetic polypeptide"
MAADGYLPDWLEDTLSEGIRQWWKLKPGPPPPKPAERHKDGSRGLVLPGYKYLGPFNGLDKGEPVNEADAAALEHDKAYDRQLNSGDNPYLKYNHADAEFQERLKEDTSFGGNLGRAVFQAKKRVLEPLGLVEEPVKTAPGKKRPVEHSPAEPDSSSGTGKAGQQPARKRLNFGQTGDADSVPDPQPLGQPPAAPSGLGSTTMATGSGAPMADNNEGADGVGNSSGNWHCDSQWLGDRVITTSTRTWALPTYNNHLYKQISSQSGASNDNHYFGYSTPWGYFDFNRFHCHFSPRDWQRLINNNWGFRPKRLNFKLFNIQVKEVTQNDGTTTIANNLTSTVQVFTDSEYQLPYVLGSAHQGCLPPFPADVFMVPQYGYLTLNNGSQAVGRSPFYCLEYFPSQMLRTGNNFQFSYTFEDVPFHSSYAHSQSLDRLMNPLIDQYLYYLNKTQTNSGTLQQSRLLFSQAGPTNMSLQAKNWLPGPCYRQQRLSKQANDNNNSNFPWTAATKYHLNGRDSLVNPGPAMASHKDDEEKFFPMHGTLIFGKQGTNANDADLENVMITDEEEIRTTNPVATEQYGTVSNNLQNSNTGPTTGTVNHQGALPGMVWQDRDVYLQGPIWAKIPHTDGHFHPSPLMGGFGLKHPPPQIMIKNTPVPANPPTNFSSAKFASFITQYSTGQVSVEIEWELQKENSKRWNPEIQYTSNYNKSVNVDFTVDNNGVYSEPRPIGTRYLTRNL

SEQ ID NO: 233 - DNA, 2208 bp, Artificial Sequence
  source: /note="Description of Artificial Sequence: Synthetic polynucleotide"
atggctgccgatggttatcttccagattggctcgaggacactctctctgaaggaataagacagtggtggaagctcaaacctggcccaccaccaccaaagcccgcagagcggcataaggacgacagcaggggtcttgtgcttcctgggtacaagtacctcggacccttcaacggactcgacaagggagagccggtcaacgaggcagacgccgcggccctcgagcacgacaaggcctacgaccggcagctcgacagcggagacaacccgtacctcaagtacaaccacgccgacgcggagtttcaggagcgtcttaaagaagatacgtcttttgggggcaacctcggacgagcagtcttccaggccaaaaagaggattcttgaacctctgggcctggttgaggaacctgttaagacggctccgggaaaaaagaggccggtagagcactctcctgcggagccagactcctcctcgggaaccggaaaagcgggccagcagcctgcaagaaagagattgaattttggtcagactggagacgcagactcagtacctgacccccagcctctcggacagccaccagcagccccctctggtctgggaactaatacgatggcttcaggcagtggcgcaccaatggcagacaataacgagggcgccgacggagtgggtaattcctcgggaaattggcattgcgattccacatggatgggcgacagagtcatcaccaccagcacccgcacctgggccctgcccacctacaacaaccatctgtacaagcaaatctccagccagtctggagccagcaacgacaaccactactttggctacagcaccccctgggggtattttgacttcaacagattccactgccacttctccccacgtgactggcaaagactcatcaacaacaactggggattccggcccaagagactcagcttcaagctctttaacattcaagtcaaagaggtcacgcagaatgacggtacgacgacgattgccaataaccttaccagcacggttcaggtgtttactgactcggagtaccagctcccgtacgtcctcggctcggcgcatcaaggatgcctcccgccgttcccagcagacgtcttcatggtgccacagtatggatacctcaccctgaacaacggcagtcaggcggtaggacgctcttccttttactgcctggagtactttccttctcagatgcttcgtaccggaaacaactttaccttcagctacacctttgaagacgttcctttccatagcagctacgctcacagccaaagtctggaccgtctcatgaatcctctcatcgaccagtacctgtattacttgagcagaacaaacactccaagcggaaccaccacgatgtccaggcttcagttttctcaggccggagcaagtgacattcgggaccagtctagaaactggcttcctggaccctgttaccgccagcagcgagtatcaaagacagctgcggacaacaacaacagtgattactcgtggactggagctaccaagtaccacctcaatggaagagactctctggtgaatccgggcccagctatggccagccacaaggacgatgaagaaaaatattttcctcagagcggggttctcatctttggaaaacaagactcgggaaaaactaatgtggacattgaaaaggttatgattacagacgaagaggaaatcaggaccaccaatcccgtggctacggagcagtatggttctgtatctaccaacctccagagcggcaacacacaagcagctacctcagatgtcaacacacaaggcgttcttccaggcatggtctggcaggacagagacgtgtacctgcaggggcccatctgggcaaagattccacacacggacggacattttcacccctctcccctcatgggcggattcggacttaaacaccctcctccacaaattctcatcaagaacaccccggtacctgcgaatccttcgaccactttcagtgcggcaaagtttgcttccttcatcacacagtactccacggggcaggtcagcgtggagatcgagtgggagctgcagaaggagaacagcaaacgctggaatcccgaaattcagtacacttccaactacaacaaatctgttaatgtggactttactgtggacactaatggtgtgtattcagagcctcgccccattggcaccagatacctgactcgtaatctgtaa

SEQ ID NO: 234 - protein, 735 aa, Artificial Sequence
  source: /note="Description of Artificial Sequence: Synthetic polypeptide"
MAADGYLPDWLEDTLSEGIRQWWKLKPGPPPPKPAERHKDDSRGLVLPGYKYLGPFNGLDKGEPVNEADAAALEHDKAYDRQLDSGDNPYLKYNHADAEFQERLKEDTSFGGNLGRAVFQAKKRILEPLGLVEEPVKTAPGKKRPVEHSPAEPDSSSGTGKAGQQPARKRLNFGQTGDADSVPDPQPLGQPPAAPSGLGTNTMASGSGAPMADNNEGADGVGNSSGNWHCDSTWMGDRVITTSTRTWALPTYNNHLYKQISSQSGASNDNHYFGYSTPWGYFDFNRFHCHFSPRDWQRLINNNWGFRPKRLSFKLFNIQVKEVTQNDGTTTIANNLTSTVQVFTDSEYQLPYVLGSAHQGCLPPFPADVFMVPQYGYLTLNNGSQAVGRSSFYCLEYFPSQMLRTGNNFTFSYTFEDVPFHSSYAHSQSLDRLMNPLIDQYLYYLSRTNTPSGTTTMSRLQFSQAGASDIRDQSRNWLPGPCYRQQRVSKTAADNNNSDYSWTGATKYHLNGRDSLVNPGPAMASHKDDEEKYFPQSGVLIFGKQDSGKTNVDIEKVMITDEEEIRTTNPVATEQYGSVSTNLQSGNTQAATSDVNTQGVLPGMVWQDRDVYLQGPIWAKIPHTDGHFHPSPLMGGFGLKHPPPQILIKNTPVPANPSTTFSAAKFASFITQYSTGQVSVEIEWELQKENSKRWNPEIQYTSNYNKSVNVDFTVDTNGVYSEPRPIGTRYLTRNL

SEQ ID NO: 235 - DNA, 2208 bp, Artificial Sequence
  source: /note="Description of Artificial Sequence: Synthetic polynucleotide"
atggctgccgatggttatcttccagattggctcgaggacactctctctgaaggaataagacagtggtggaagctcaaacctggcccaccaccaccaaagcccgcagagcggcataaggacgacagcaggggtcttgtgcttcctgggtacaagtacctcggacccttcaacggactcgacaagggagagccggtcaacgaggcagacgccgcggccctcgagcacgacaaggcctacgaccggcagctcgacagcggagacaacccgtacctcaagtacaaccacgccgacgcggagtttcaggagcgtcttaaagaagatacgtcttttgggggcaacctcggacgagcagtcttccaggccaaaaagaggattcttgaacctctgggcctggttgaggaacctgttaagacggctccgggaaaaaagaggccggtagagcactctcctgcggagccagactcctcctcgggaaccggaaaagcgggccagcagcctgcaagaaagagattgaattttggtcagactggagacgcagactcagtacctgacccccagcctctcggacagccaccagcagccccctctggtctgggaactaatacgatggcttcaggcagtggcgcaccaatggcagacaataacgagggcgccgacggagtgggtaattcctcgggaaattggcattgcgattccacatggatgggcgacagagtcatcaccaccagcacccgcacctgggccctgcccacctacaacaaccatctgtacaagcaaatctccagccagtctggagccagcaacgacaaccactactttggctacagcaccccctgggggtatttcgacttcaacagattccactgccacttctccccacgtgactggcaaagactcatcaacaacaactggggattccggcccaagagactcagcttcaagctctttaacattcaagtcaaagaggtcacgcagaatgacggtacgacgacgattgccaataaccttaccagcacggttcaggtgtttactgactcggggtaccagctcccgtacgtcctcggctcggcgcatcaaggatgccttccgccgttcccagcagacgtcttcatggtgccacagtatggatacctcaccctgaacaacggcagtcaggcggtaggacgctcttccttttactgcctggagtactttccttctcagatgcttcgtaccggaaacaactttaccttcagctacacctttgaagacgttcctttccatagcagctacgctcacggccaaagtctggaccgtctcatgaatcctctcatcgaccagtacctgtattacttgagcagaacaaacactccaagcggaaccaccacgatgtccaggcttcagttttctcaggccggagcaagtgacgttcgggaccagtctagaaactggcttcctggaccctgttaccgccagcagcgagtatcaaagacagctgcggacaacaacaacagtgattactcgtggactggagctaccaagtaccacctcaatggaagagactctctggtgaatccgggcccagctatggccagccacaaggacgatgaagaaaaatattttcctcagagcggggttctcgtctttggaaaacaagactcgggaaaaactaatgtggacattgaaaaggttatgattacagacgaagaggaaatcaggaccaccaatcccgcggctacggagcagtatggttctgtatctaccaacctccagagcggcaacacacaagcagctacctcagatgtcaacacacaaggcgttcttccaggcatggtctggcaggacagagacgtgtacctgcaggggcccatctgggcaaagattccacacacggacggacattttcacccctctcccctcatgggcggattcggacttaaacaccctcctccacaaattctcatcaagaacaccccggtacctgcgaatccttcgaccactttcagtgcggcaaagtttgtttccttcatcacacagtactccacggggcaggtcagcgtggagatcgagtgggagctgcagaaggagaacagcaaacgctggaatcccgaaattcagtacacttccaactacaacaaatctgttaatgtggactttactgtggacactaatggtgtgtattcagagcctcgccccattggcaccagatacctgactcgtaatctgtaa

SEQ ID NO: 236 - protein, 735 aa, Artificial Sequence
  source: /note="Description of Artificial Sequence: Synthetic polypeptide"
MAADGYLPDWLEDTLSEGIRQWWKLKPGPPPPKPAERHKDDSRGLVLPGYKYLGPFNGLDKGEPVNEADAAALEHDKAYDRQLDSGDNPYLKYNHADAEFQERLKEDTSFGGNLGRAVFQAKKRILEPLGLVEEPVKTAPGKKRPVEHSPAEPDSSSGTGKAGQQPARKRLNFGQTGDADSVPDPQPLGQPPAAPSGLGTNTMASGSGAPMADNNEGADGVGNSSGNWHCDSTWMGDRVITTSTRTWALPTYNNHLYKQISSQSGASNDNHYFGYSTPWGYFDFNRFHCHFSPRDWQRLINNNWGFRPKRLSFKLFNIQVKEVTQNDGTTTIANNLTSTVQVFTDSGYQLPYVLGSAHQGCLPPFPADVFMVPQYGYLTLNNGSQAVGRSSFYCLEYFPSQMLRTGNNFTFSYTFEDVPFHSSYAHGQSLDRLMNPLIDQYLYYLSRTNTPSGTTTMSRLQFSQAGASDVRDQSRNWLPGPCYRQQRVSKTAADNNNSDYSWTGATKYHLNGRDSLVNPGPAMASHKDDEEKYFPQSGVLVFGKQDSGKTNVDIEKVMITDEEEIRTTNPAATEQYGSVSTNLQSGNTQAATSDVNTQGVLPGMVWQDRDVYLQGPIWAKIPHTDGHFHPSPLMGGFGLKHPPPQILIKNTPVPANPSTTFSAAKFVSFITQYSTGQVSVEIEWELQKENSKRWNPEIQYTSNYNKSVNVDFTVDTNGVYSEPRPIGTRYLTRNL

SEQ ID NO: 237 - DNA, 2208 bp, Artificial Sequence
  source: /note="Description of Artificial Sequence: Synthetic polynucleotide"
atggctgccgatggttatcttccagattggctcgaggacactctctctgaaggaataagacagtggtggaaactcaaacctggcccaccaccaccaaagcccgcagagcggcataaggacgacagcaggggtcttgtgcttcctgggtacaagtacctcggacccttcaacggactcgacaagggagagccggtcaacgaggcagacgccgcggccctcgagcacgacaaggcctacgaccggcagctcgacagcggagacaacccgtacctcaagtacaaccacgccgacgcggagtttcaggagcgccttaaagaagatacgtcttttgggggcaacctcggacgagcagtcttccaggcaaaaaagagggttctggaacctctgagcctggttgaggagcctgttaagacggctccgggaaaaaagaggccggtagagcactctcccgcagagccagattcctcctccggaactggaaagtcgggcaaccagcctgcaagaaagagattgaatttcggtcagactggagactcagactccgtacctgacccccagcctctcggacagccaccagcagccccctctggtctgggaactaatacgatggctacaggcagtggcgcaccaatggcagacaataacgagggcgccgacggagtgggtaattcctcgggaaattggcattgcgattccacatggatgggcgacagagtcatcaccaccagcacccgaacctgggccctgcccacctacaacaaccatctgtacaagcaaatatccagccagtctggagccagcaacgacaatcactactttggctacagcaccccctgggggtattttgacttcaacagattccactgccacttttcaccacgtgactggcaaagactcatcaacaacaactggggattccgacccaagagactcaacttcaagctctttaacattcaagtcaaagaggtcacgcagaatgacggtacgacgacgattgccaataaccttaccagcacggttcaggtgtttactgactcggagtaccagctcccgtacgtcctcggctcggcgcatcaaggatgcctcccgccgttcccagcagacgtcttcatggtgccacagtatggatacctcaccctgaacaacgggagtcaggcagtaggacgctcttcattttactgcctagagtactttccttctcagatgctgcgtaccggaaacaactttaccttcagctacacctttgaggacgttcctttccacagcagctacgctcacagccagagtttggaccgtctcatgaatcctctcatcgaccagtacctgtattacttgagcagaacaaacactccaagcggaaccaccacgcagtccaggcttcagttttctcaggccggagcgagtgacattcaggaccagtctaggaactggcttcctggaccctgttaccgtcagcagcgagtatcaaagacatctgcggataacaacaacagtgaatactcgtggactggagctaccaagtaccacctcaatggcagagactctctggtgaatccgggcccggccatggccagccacaaagacgatgaagaaaagttttttcctcagagcggggttcttatctttgggaagcaaggctcagagaaaacaaatgtggatattgaaaaggtcatgattacagacgaagaggaaatcaggaccaccaatcccgtggctacggagcagtatggttctgtatctaccaacctccagagcggcaacacacaagcagctaccgcagatgtcaacacacaaggcgttcttccaggcatggtcgggcaagacagagacgtgtacctgcaggggcctacttgggcaaagattccacacacggacggacattttcacccctctcccctcatgggcggatttggacttaaacaccctcctccacagattctcatcaagaacaccccggtacctgcgaatccttcgaccaccttcagtgcggcaaagtttgcttccttcattacacagtactccacggggcaggtcagcgtggagatcgagtgggagctgcagaaggagaacagcaaacgctggaatcccgagatccagtacacttccaactacaacaagtctgttaatgtggactttactgtggacactaatggcgtgtattcagagcctcgccccattggcaccagatacctgactcgtaatctgtaa

SEQ ID NO: 238 - protein, 735 aa, Artificial Sequence
  source: /note="Description of Artificial Sequence: Synthetic polypeptide"
MAADGYLPDWLEDTLSEGIRQWWKLKPGPPPPKPAERHKDDSRGLVLPGYKYLGPFNGLDKGEPVNEADAAALEHDKAYDRQLDSGDNPYLKYNHADAEFQERLKEDTSFGGNLGRAVFQAKKRVLEPLSLVEEPVKTAPGKKRPVEHSPAEPDSSSGTGKSGNQPARKRLNFGQTGDSDSVPDPQPLGQPPAAPSGLGTNTMATGSGAPMADNNEGADGVGNSSGNWHCDSTWMGDRVITTSTRTWALPTYNNHLYKQISSQSGASNDNHYFGYSTPWGYFDFNRFHCHFSPRDWQRLINNNWGFRPKRLNFKLFNIQVKEVTQNDGTTTIANNLTSTVQVFTDSEYQLPYVLGSAHQGCLPPFPADVFMVPQYGYLTLNNGSQAVGRSSFYCLEYFPSQMLRTGNNFTFSYTFEDVPFHSSYAHSQSLDRLMNPLIDQYLYYLSRTNTPSGTTTQSRLQFSQAGASDIQDQSRNWLPGPCYRQQRVSKTSADNNNSEYSWTGATKYHLNGRDSLVNPGPAMASHKDDEEKFFPQSGVLIFGKQGSEKTNVDIEKVMITDEEEIRTTNPVATEQYGSVSTNLQSGNTQAATADVNTQGVLPGMVGQDRDVYLQGPTWAKIPHTDGHFHPSPLMGGFGLKHPPPQILIKNTPVPANPSTTFSAAKFASFITQYSTGQVSVEIEWELQKENSKRWNPEIQYTSNYNKSVNVDFTVDTNGVYSEPRPIGTRYLTRNL

SEQ ID NO: 239 - DNA, 2208 bp, Artificial Sequence
  source: /note="Description of Artificial Sequence: Synthetic polynucleotide"
atggctgccgatggttatcttccagattggctcgaggacactctctctgaaggaataagacagtggtggaagctcaaacctggcccaccaccaccaaagcccgcagagcggcataaggacgacagcaggggtcttgtgcttcctgggtacaagtacctcggacccttcaacggactcgacaagggagagccggtcaacgaggcagacgccgcggccctcgagcacgacaaggcctacgaccggcagctcgacagcggagacaacccgtacctcaagtacaaccacgccgacgcagagtttcaggagcgccttaaagaagatacgtcttttgggggcaacctcggacgagcagtcttccaggcaaaaaagagggttctggaacctctgggcctggttgaggagcctgttaagacggctccgggaaaaaagaggccggtagagcactctcctgcagagccagattcctcctccggaactggaaagtcgggcaaccagcctgcaagaaagagattgaatttcggtcagactggagactcagactccgtacctgacccccagcctctcggacagccaccagcagccccctctggtctgggaactaatacgatggctacaggcagtggcgcaccaatggcagacaataacgagggcgccgacggagtgggtaattcctcgggaaattggcattgcgattccacatggatgggcgacagagtcatcaccaccagcacccgaacctgggccctgcccacctacaacaaccatctgtacaagcaaatatccagccagtctggagccagcaacgacaatcactactttggctacagcaccccctgggggtattttgacttcaacagattccactgccacttttcaccacgtgactggcaaagactcatcaacaacaactggggattccgacccaagagactcaacttcaagctctttaacattcaagtcaaagaggtcacgcagaatgacggtacgacgacgattgccaataaccttaccagcacggttcaggtgtttactgactcggagtaccagctcccgtacgtcctcggctcggcgcatcaaggatgcctcccgccgttcccagcagacgtcttcatggtgccacagtatggatacctcaccctgaacaacgggagtcaggcagtaggacgctcttcattttactgcctagggtactttccttctcagatgctgcgtaccggaaacaactttaccttcagctacacctttgaggacgttcctttccacagcagctacgctcacagccagagtttggaccgtctcatgaatcctctcatcgaccagtacctgtattacttgagcagaacaaacactccaagcggaaccaccacgcagtccaggcttcagttttctcaggccggagcgagtgacattcgggaccagtctaggaactggcttcctggaccctgttaccgtcagcagcgagtatcaaagacatctgcggataacaacaacagtgaatactcgtggactggagctaccaagtaccacctcaatggcagagactctctggtgaatccgggcccggccatggccagccacaaagacgatgaagaaaagttttttcctcagagcggggttcttatctttgggaagcaaggcccagagaaaacaaatgtggatattgaaaaggtcatgattacagacgaagaggaaatcaggaccaccaatcccgtggctacggagcagtatggttctgtatctaccaacctccagagcggcaacacacaagcagctaccgcagatgtcaacacacaaggcgttcttccaggcatggtctggcaagacagagacgtgtacctgcaggggcctatttgggcaaagattccacacacggacggacattttcacccctctcccctcatgggcggatttggacttaaacaccctcctccacagattctcatcaagaacaccccggtacctgcgaatccttcgaccaccttcagtgcggcaaagtttgcttccttcattacacagtactccacggggcaggtcagcgtggagatcgagtgggagctgcagaaggagaacagcaaacgctggaatcccgagatccagtacacttccaactacaacaagtctgttaatgtggactttactgtggacactaatggcgtgtattcagagcctcgccccattggcaccagatacctgactcgtaatctgtaa

SEQ ID NO: 240 - protein, 735 aa, Artificial Sequence
  source: /note="Description of Artificial Sequence: Synthetic polypeptide"
MAADGYLPDWLEDTLSEGIRQWWKLKPGPPPPKPAERHKDDSRGLVLPGYKYLGPFNGLDKGEPVNEADAAALEHDKAYDRQLDSGDNPYLKYNHADAEFQERLKEDTSFGGNLGRAVFQAKKRVLEPLGLVEEPVKTAPGKKRPVEHSPAEPDSSSGTGKSGNQPARKRLNFGQTGDSDSVPDPQPLGQPPAAPSGLGTNTMATGSGAPMADNNEGADGVGNSSGNWHCDSTWMGDRVITTSTRTWALPTYNNHLYKQISSQSGASNDNHYFGYSTPWGYFDFNRFHCHFSPRDWQRLINNNWGFRPKRLNFKLFNIQVKEVTQNDGTTTIANNLTSTVQVFTDSEYQLPYVLGSAHQGCLPPFPADVFMVPQYGYLTLNNGSQAVGRSSFYCLGYFPSQMLRTGNNFTFSYTFEDVPFHSSYAHSQSLDRLMNPLIDQYLYYLSRTNTPSGTTTQSRLQFSQAGASDIRDQSRNWLPGPCYRQQRVSKTSADNNNSEYSWTGATKYHLNGRDSLVNPGPAMASHKDDEEKFFPQSGVLIFGKQGPEKTNVDIEKVMITDEEEIRTTNPVATEQYGSVSTNLQSGNTQAATADVNTQGVLPGMVWQDRDVYLQGPIWAKIPHTDGHFHPSPLMGGFGLKHPPPQILIKNTPVPANPSTTFSAAKFASFITQYSTGQVSVEIEWELQKENSKRWNPEIQYTSNYNKSVNVDFTVDTNGVYSEPRPIGTRYLTRNL

SEQ ID NO: 241 - protein, 735 aa, Artificial Sequence
  source: /note="Description of Artificial Sequence: Synthetic polypeptide"
MAADGYLPDWLEDTLSEGIRQWWKLKPGPPPPKPAERHKDDSRGLVLPGYKYLGPFNGLDKGEPVNEADAAALEHDKAYDRQLDSGDNPYLKYNHADAEFQERLKEDTSFGGNLGRAVFQAKKRVLEPLGLVEEPVKTAPGKKRPVEHSPAEPDSSSGTGKSGNQPARKRLNFGQTGDSDSVPDPQPLGQPPAAPSGLGTNTMATGSGAPMADNNEGADGVGNSSGNWHCDSTWMGDRVITTSTRTWALPTYNNHLYKQISSQSGASNDNHYFGYSTPWGYFDFNRFHCHFSPRDWQRLINNNWGFRPKRLNFKLFNIQVKEVTQNDGTTTIANNLTSTVQVFTDSEYQLPYVLGSAHQGCLPPFPADVFMVPQYGYLTLNNGSQAVGRSSFYCLEYFPSQMLRTGNNFTFSYTFEDVPFHSSYAHSQSLDRLMNPLIDQYLYYLSRTNTPSGTTTQSRLQFSQAGASDIRDQSRNWLPGPCYRQQRVSKTSADNNNSEYSWTGATKYHLNGRDSLVNPGPAMASHKDDEEKFFPQSGVLIFGKQGPEKTNVDIEKVMITDEEEIRTTNPVATEQYGSVSTNLQSGNTQAATADVNTQGVLPGMVWQDRDVYLQGPIWAKIPHTDGHFHPSPLMGGFGLKHPPPQILIKNTPVPANPSTTFSAAKFASFITQYSTGQVSVEIEWELQKENSKRWNPEIQYTSNYNKSVNVDFTVDTNGVYSEPRPIGTRYLTRNL

SEQ ID NO: 242 - protein, 735 aa, Artificial Sequence; identical to SEQ ID NO: 241
  source: /note="Description of Artificial Sequence: Synthetic polypeptide"

SEQ ID NO: 243 - DNA, 2211 bp, Artificial Sequence
  source: /note="Description of Artificial Sequence: Synthetic polynucleotide"
atggctgccgatggttatcttccagattggctcgaggacactctctctgaaggaataagacagtggtggaagctcaaacctggcccaccaccaccaaagcccgcagagcggcataaggacgacagcaggggtcttgtgcttcctgggtacaagtacctcggacccttcaacggactcgacaagggggagccggtcaacgaggcagacgccgcggccctcgagcacgacaaggcctacgaccggcagctcgacagcggagacaacccgtacctcaagtacaaccacgccgacgcagagtttcaggagcgccttaaagaagatacgtcttttgggggcaacctcggacgagcagtcttccaggcgaaaaagagggttcttgaacctctgcggcctggtttgaggaaacctgttaagacggctccgggaaaaaagaggccggtagagcactctcctgtggagccagactcctcctcgggaaccggaaaagcgggccagcagcctgcaagaaaaagattaaattttggtcagactggagacgcagactccgtacctgacccccagcctctcggacagccaccagcagccccctctggtctgggatctactacaatggctacaggcagtggcgcaccaatggcagacaataacgagggtgccgatggagtgggtaattcctcaggaaattggcattgcgattcccaatggctggacgacagagtcatcgccaccagcacccgaacctgggccctgcccacatacaacaaccacctctacaagcaaatctccagccaatcaggagcctgcaacgacaaccactactttggctacagcaccccctgggggtattttgacttcaacagattccactgccacttttcaccacgtgactggcaaagactcatcaacagcaactggggattccggcccaaaagactcaacttcaagctctttaatattcaagtcaaagaggtcacgcagaatgacggtacgacgacgattgccaataaccttaccagcacggttcaggtgtttactgactcggagtaccagctcccgtacgtcccgggctcggcgcatcaaggatgcctcccgccgtttccagcggacgtcttcatggtcccacagtatggatacctcaccctgaacaacgggagtcaggcggtaggacgctcttccttttactgcctggagtactttccttctcagatgctgcgtactggaaacaactttcagttcagctacacttttgaagacgtgcctttccacagcagctacgctcactgccagagtctggatcggctgatgaatcctctgatcgaccagtacctgtattatctgaacaagacacaaacaaatagtggaactcttcagcagtctcggctactgtttagccaagctggaccaaccaacatgtctcttcaagctaaaaactggctgcctggaccttgctacagacagcagcgtctgtcaaaacaggcaaacgacaataacaactgcaactttccctggactgcagctacaaagtatcatctaaatggccgggactcgttggttaatccaggaccagctatggccagtcacaaggatgacgaagaaaagtttttccccatgcatggaaccctgatatttggtaaacaaggaacaaatgccaacgacgcggatttggaaaatgtcatgattacagatgaagaagaaatcaggcccaccaatcccgtggctacggagcagtacgggactgtgtcaaataatttgcaaaactcaaacactggtccaactacaggaactgtcaatcaccaaggagcgttacctggtatggtgtggcaggatcgagacgtgtacctgcagggacccatttgggccaagattcctcacaccgatggacactttcatccttctccactgatgggaggttttggactcaaacacccgcctcctcagatcatgatcaaaagcactcccgttccagccaatcctcccacaaacttcagttctgccaagtttgcttcttccatcacacagtattccacgggacaggtcagcgtggagatcgagtgggagctgcagaaggagaacagcaaacgctggaatcccgaaattcagtacacttccaactacaacaagtctgttaatgtggactttactgtggacactaatggtgtgtattcagagcctcgccccattggcaccagatacctgactcgtaatctgtaa

SEQ ID NO: 244 - protein, 736 aa, Artificial Sequence
  source: /note="Description of Artificial Sequence: Synthetic polypeptide"
MAADGYLPDWLEDTLSEGIRQWWKLKPGPPPPKPAERHKDDSRGLVLPGYKYLGPFNGLDKGEPVNEADAAALEHDKAYDRQLDSGDNPYLKYNHADAEFQERLKEDTSFGGNLGRAVFQAKKRVLEPLRPGLRKPVKTAPGKKRPVEHSPVEPDSSSGTGKAGQQPARKRLNFGQTGDADSVPDPQPLGQPPAAPSGLGSTTMATGSGAPMADNNEGADGVGNSSGNWHCDSQWLDDRVIATSTRTWALPTYNNHLYKQISSQSGACNDNHYFGYSTPWGYFDFNRFHCHFSPRDWQRLINSNWGFRPKRLNFKLFNIQVKEVTQNDGTTTIANNLTSTVQVFTDSEYQLPYVPGSAHQGCLPPFPADVFMVPQYGYLTLNNGSQAVGRSSFYCLEYFPSQMLRTGNNFQFSYTFEDVPFHSSYAHCQSLDRLMNPLIDQYLYYLNKTQTNSGTLQQSRLLFSQAGPTNMSLQAKNWLPGPCYRQQRLSKQANDNNNCNFPWTAATKYHLNGRDSLVNPGPAMASHKDDEEKFFPMHGTLIFGKQGTNANDADLENVMITDEEEIRPTNPVATEQYGTVSNNLQNSNTGPTTGTVNHQGALPGMVWQDRDVYLQGPIWAKIPHTDGHFHPSPLMGGFGLKHPPPQIMIKSTPVPANPPTNFSSAKFASSITQYSTGQVSVEIEWELQKENSKRWNPEIQYTSNYNKSVNVDFTVDTNGVYSEPRPIGTRYLTRNL

SEQ ID NO: 245 - DNA, 2208 bp, Artificial Sequence
  source: /note="Description of Artificial Sequence: Synthetic polynucleotide"
atggctgccgatggttatcttccagattggctcgaggacactctctctgaaggaataagacagtggtggaagctcaaacctggcccaccaccaccaaagcccgcagagcggcataaggacgacagcaggggtcttgtgcttcctgggtacaagtacctcggacccttcaacggactcgacaagggagagccggtcaacgaggcagacgccgcggccctcgagcacgacaaggcctacgaccggcagctcgacagcggagacaacccgtacctcaagtacaaccacgccgacgcggagtttcaggagcgccttaaagaggatacgtcttttgggggcaacctcggacgagcagtcttccaggcaaaaaagagggttctggaacctctgggcctggttgaggagcctgttaagacggctccgggaaaaaagaggccggtagagcactctcctgcagagccagattcctcctccggaactggaaagtcgggcaaccagcctgcaagaaagagattgaatttcggtcagactggagactcagactccgtacctgacccccagcctctcggacagccaccagcagccccctctggtctgggaactaatacgatggctacaggcagtggcgcaccaatggcagacaataacgagggcgccgacggagtgggtaattcctcgggaaattggcattgcgattccacatggatgggcgacagagtcatcaccaccagcacccgaacctgggccctgcccacctacaacaaccatctgtacaagcaaatatccagccagtctggagccagcaacgacaatcactactttggctacagcaccccctgggggtattttgacttcaacagattccactgccacttttcaccacgtgactggcaaagactcatcaacaacaactggggattccgacccaagagactcaacttcaagctctttaacattcaagtcaaagaggtcacgcagaatgacggtacgacgacgattgccaataaccttaccagcacggttcaggtgtttactgactcggagtaccagctcccgtacgtcctcggctcggcgcatcaaggatgcctcccgccgttcccagcagacgtcttcatggtgccacagtatggatacctcaccctgaacaacgggagtcaggcagtaggacgctcttcattttactgcctagagtactttccttctcagatgctgcgtaccggaaacagctttaccttcagctacacctttgaggacgttcctttccacagcagctacgctcacagccagagtttggaccgtctcatgaatcctctcatcgaccagtacctgtattacttgagcagaacaaacactccaagcggaaccaccacgcagtccaggcttcagttttctcaggccggagcgagtgacattcgggaccagtctaggaactggcttcctggaccctgttaccgtcagcagcgagtatcaaagacatctgcggataacaacaacagtgaatactcgtggactggagctaccaagtaccacctcaatggcagagactctctggtgaatccgggcccggccatggccagccacaaagacgatgaagaaaagttctttcctcagagcggggttcttatctttgggaagcaaggctcagagaaaacaaatgtggatattgaaaaggtcatgattacagacgaagaggaaatcaggaccaccaatcccgtggctacggagcagtatggttctgtatctaccaacctccagagcggcaacacacaagcagctaccgcagatgtcaacacacaaggcgttcttccaggcatggtctggcaagacagagacgtgtacctgcaggggcctatttgggcaaagattccacacacggacggacattttcacccctctcccctcatgggcggatttggacttaaacaccctcctccacagattctcatcaagaacaccccggtacctgcgaatccttcgaccaccttcagtgcggcaaagtttgcttccttcattacacagtactccacggggcaggtcagcgtggagatcgagtgggagctgcagaaggagaacagcaaacgctggaatcccgagatccagtacacttccaactacaacaagtctgttaatgtggactttactgtggacactaatggcgtgtattcagagcctcgccccattggcaccagatacctgactcgtaatctgtaa

SEQ ID NO: 246 - protein, 735 aa, Artificial Sequence
  source: /note="Description of Artificial Sequence: Synthetic polypeptide"
MAADGYLPDWLEDTLSEGIRQWWKLKPGPPPPKPAERHKDDSRGLVLPGYKYLGPFNGLDKGEPVNEADAAALEHDKAYDRQLDSGDNPYLKYNHADAEFQERLKEDTSFGGNLGRAVFQAKKRVLEPLGLVEEPVKTAPGKKRPVEHSPAEPDSSSGTGKSGNQPARKRLNFGQTGDSDSVPDPQPLGQPPAAPSGLGTNTMATGSGAPMADNNEGADGVGNSSGNWHCDSTWMGDRVITTSTRTWALPTYNNHLYKQISSQSGASNDNHYFGYSTPWGYFDFNRFHCHFSPRDWQRLINNNWGFRPKRLNFKLFNIQVKEVTQNDGTTTIANNLTSTVQVFTDSEYQLPYVLGSAHQGCLPPFPADVFMVPQYGYLTLNNGSQAVGRSSFYCLEYFPSQMLRTGNSFTFSYTFEDVPFHSSYAHSQSLDRLMNPLIDQYLYYLSRTNTPSGTTTQSRLQFSQAGASDIRDQSRNWLPGPCYRQQRVSKTSADNNNSEYSWTGATKYHLNGRDSLVNPGPAMASHKDDEEKFFPQSGVLIFGKQGSEKTNVDIEKVMITDEEEIRTTNPVATEQYGSVSTNLQSGNTQAATADVNTQGVLPGMVWQDRDVYLQGPIWAKIPHTDGHFHPSPLMGGFGLKHPPPQILIKNTPVPANPSTTFSAAKFASFITQYSTGQVSVEIEWELQKENSKRWNPEIQYTSNYNKSVNVDFTVDTNGVYSEPRPIGTRYLTRNL

SEQ ID NO: 247 - DNA, 2211 bp, Artificial Sequence; identical to SEQ ID NO: 137
  source: /note="Description of Artificial Sequence: Synthetic polynucleotide"

SEQ ID NO: 248 - protein, 736 aa, Artificial Sequence
  source: /note="Description of Artificial Sequence: Synthetic polypeptide"
MAADGYLPDWLEDTLSEGIRQWWKLKPGPPPPKPAERHKDDSRGLVLPGYKYLGPGNGLDKGEPVNAADAAALEHDKAYDQQLKAGDNPYLKYNHADAEFQERLKEDTSFGGNLGRAVFQAKKRLLEPLGLVEEAAKTAPGKKRPVEQSPQEPDSSAGIGKSGSQPAKKKLNFGQTGDTESVPDPQPIGEPPAAPSGVGSLTMASGGGAPVADNNEGADGVGSSSGNWHCDSQWLGDRVITTSTRTWALPTYNNHLYKQISNSTSGGSSNDNAYFGYSTPWGYFDFNRFHCHFSPRDWQRLINNNWGFRPKRLNFKLFNIQVKEVTDNNGVKTIANNLTSTVQVFTDSDYQLPYVLGSAHEGCLPPFPADVFMIPQYGYLTLNDGGQAVGRSSFYCLEYFPSQMLRTGNNFQFSYEFENVPFHSSYAHSQSLDRLMNPLIDQYLYYLSKTINGSGQNQQTLKFSVAGPSNMAVQGRNYIPGPSYRQQRVSTTVTQNNNSEFAWPGASSWALNGRNSLMNPGPAMASHKEGEDRFFPLSGSLIFGKQGTGRDNVDADKVMITNEEEIKTTNPVATESYGQVATNHQSAQAQAQTGWVQNQGILPGMVWQDRDVYLQGPIWAKIPHTDGNFHPSPLMGGFGMKHPPPQILIKNTPVPADPPTAFNKDKLNSFITQYSTGQVSVEIEWELQKENSKRWNPEIQYTSNYYKSNNVEFAVSTEGVYSEPRPIGTRYLTRNL

SEQ ID NO: 249 - DNA, 2211 bp, Artificial Sequence
  source: /note="Description of Artificial Sequence: Synthetic polynucleotide"
atggctgccgatggttatcttccagattggctcgaggacactctctctgaaggaataagacagtggtggaagctcaaacctggcccaccaccaccaaagcccgcagagcggcataaggacgacagcaggggtcttgtgcttcctgggtacaagtacctcggacccggcaacggactcgacaagggggagccggtcaacgcagcagacgcggcggccctcgagcacgacaaggcctacgaccagcagctcaaggccggagacaacccgtacctcaagtacaaccacgccgacgccgagttccaggagcggctcaaagaagatacgtcttttgggggcaacctcgggcgagcagtcttccaggccaaaaagaggcttcttgaacctcttggtctggttgaggaagcggctaagacggctcctggaaagaagaggcctgtagagcagtctcctcaggaaccggactcctccgcgggtattggcaaatcgggttcacagcccgctaaaaagaaactcaatttcggtcagactggcgacacagagtcagtccccgaccctcaaccaatcggagaacctcccgcagccccctcaggtgtgggatctcttacaatggcttcaggtggtggcgcaccagtggcagacaataacgaaggtgccgatggagtgggtagttcctcgggaaattggcattgcgattcccaatggctgggggacagagtcatcaccaccagcacccgaacctgggccctgcccacctacaacaatcacctctacaagcaaatctccaacagcacatctggaggatcttcaaatgacaacgcctacttcggctacagcaccccctgggggtattttgacttcaacagattccactgccacttctcaccacgtgactggcagcgactcatcaacaacaactggggattccggcctaagcgactcaacttcaagctcttcaacattcaggtcaaagaggttacggacaacaatggagtcaagaccatcgccaataaccttaccagcacggtccaggtcttcacggactcagactatcagctcccgtacgtgctcgggtcggctcacgagggctgcctcccgccgttcccagcggacgttttcatgattcctcagtacgggtatctgacgcttaatgatgggagccaggccgtgggtcgttcgtccttttactgcctggaatatttcccgtcgcaaatgctaagaacgggtaacaacttccagttcagctacgagtttgagaacgtacctttccatagcagctacgctcacagccaaagcctggaccgactaatgaatccactcatcgaccaatacttgtactatctctcaaagactattaacggttctggacagaatcaacaaacgctaaaattcagcgtggccggacccagcaacatggctgtccagggaagaaactacatacctggacccagctaccgacaacaacgtgtctcaaccactgtgactcaaaacaacaacagcgaatttgcttggcctggagcttcttcttgggctctcaatggacgtaatagcttgatgaatcctggacctgctatggccagccacaaagaaggagaggaccgtttctttcctttgtctggatctttaatttttggcaaacaaggaactggaagagacaacgtggatgcggacaaagtcatgataaccaacgaagaagaaattaaaactactaacccggtagcaacggagtcctatggacaagtggccacaaaccaccagagtgcccaagcacaggcgcagaccggctgggttcaaaaccaaggaatacttccgggtatggtttggcaggacagagatgtgtacctgcaaggacccatttgggccaaaattcctcacacggacggcaactttcacccttctccgctaatgggagggtttggaatgaagcacccgcctcctcagatcctcatcaaaaacacacctgtacctgcggatcctccaacggctttcaataaggacaagctgaactctttcatcacccagtattctactggccaagtcagcgtggagattgagtgggagctgcagaaggaaaacagcaagcgctggaacccggagatccagtacacttccaactattacaagtctaataatgttgaatttgctgttaatactgaaggtgtatatagtgaaccccgccccattggcaccagatacctgactcgtaatctgtaa

SEQ ID NO: 250 - protein, 736 aa, Artificial Sequence
  source: /note="Description of Artificial Sequence: Synthetic polypeptide"
MAADGYLPDWLEDTLSEGIRQWWKLKPGPPPPKPAERHKDDSRGLVLPGYKYLGPGNGLDKGEPVNAADAAALEHDKAYDQQLKAGDNPYLKYNHADAEFQERLKEDTSFGGNLGRAVFQAKKRLLEPLGLVEEAAKTAPGKKRPVEQSPQEPDSSAGIGKSGSQPAKKKLNFGQTGDTESVPDPQPIGEPPAAPSGVGSLTMASGGGAPVADNNEGADGVGSSSGNWHCDSQWLGDRVITTSTRTWALPTYNNHLYKQISNSTSGGSSNDNAYFGYSTPWGYFDFNRFHCHFSPRDWQRLINNNWGFRPKRLNFKLFNIQVKEVTDNNGVKTIANNLTSTVQVFTDSDYQLPYVLGSAHEGCLPPFPADVFMIPQYGYLTLNDGSQAVGRSSFYCLEYFPSQMLRTGNNFQFSYEFENVPFHSSYAHSQSLDRLMNPLIDQYLYYLSKTINGSGQNQQTLKFSVAGPSNMAVQGRNYIPGPSYRQQRVSTTVTQNNNSEFAWPGASSWALNGRNSLMNPGPAMASHKEGEDRFFPLSGSLIFGKQGTGRDNVDADKVMITNEEEIKTTNPVATESYGQVATNHQSAQAQAQTGWVQNQGILPGMVWQDRDVYLQGPIWAKIPHTDGNFHPSPLMGGFGMKHPPPQILIKNTPVPADPPTAFNKDKLNSFITQYSTGQVSVEIEWELQKENSKRWNPEIQYTSNYYKSNNVEFAVNTEGVYSEPRPIGTRYLTRNL

SEQ ID NO: 251 - DNA, 2208 bp, Artificial Sequence
  source: /note="Description of Artificial Sequence: Synthetic polynucleotide"
atggctgccgatggttatcttccagattggctcgaggacactctctctgaaggaataagacagcggtggaagctcaaacctggcccaccaccaccagagcccgcagagcggcataaggacgacagcaggggtcttgtgcttcctgggtacaagtacctcggacccttcaacggactcgacaagggagagccggtcaacgaggcagacgccgcggccctcgagcacgacaaagcctacgaccggcagctcgacagcggagacaacccgtacctcaagtacaaccacgccgacgcggagtttcaggagcgccttaaagaagatacgtcttttgggggcaacctcggacgagcagtcttccaggcgaaaaagagggtacttgaacctctgggcctggttgaggaacctgttaagacggctccgggaaaaaagaggccggtagagcactctcctgtggagccagactcctcctcgggaaccggaaaggcgggccagcagcctgcaagaaaaagattgaattttggtcagactggagacgcagactcagtacctgacccccagcctctcggacagccaccagcagccccctctggtctgggaactaatacgatggctacaggcagtggcgcaccaatggcagacaataacgagggcgccgacggagtgggtaattcctcgggaaattggcattgcgattccacatggatgggcgacagagtcatcaccaccagcacccgaacctgggccctgcccacctacaacaaccacctctacaaacaaatttccagccaatcaggagcctcgaacgacaatcactactttggctacagcaccccttgggggtattttgacttcaacagattccactgccacttttcaccacgtgactggcaaagactcatcaacaacaactggggattccgacccaagagactcaacttcaagctctttaacattcaagtcaaagaggtcacgcagaatgacggtacgacgacgattgccaataaccttaccggcacggttcaggtgtttactgactcggagtaccagctcccgtacgtcctcggctcggcgcatcaaggatgcctcccgccgttcccagcagacgtcttcatggtgccacagtatggatacctcaccctgaacaacgggagtcaggcagtaggacgctcttcattttactgcctggagtactttccttctcagatgctgcgtaccggaaacaactttaccttcagctacacttttgaggacgttcctttccacagcagctacgctcacagccagagtctgggccgtctcatgaatcctctcatcgaccagtacctgtattacttgagcagaacaaacactccaagtggaaccaccacgcagtcaaggcttcagttttctcaggccggagcgagtgacattcgggaccagtctaggaactggcttcctggaccctgttaccgccagcagcgagtatcaaagacatctgcggataacaacaacagtgaatactcgtggactggagctaccaagtaccacctcaatggcagagactctctggtgaatccgggcccggccatggcaagccacaaggacgatgaagaaaagttttttcctcagagcggggttctcatctttgggaagcaaggctcagagaaaacaaatgtggacattgaaaaggtcatgattacagacgaagaggaaatcaggacaaccaatcccgtggctacggagcagtatggttctgtatctaccaacctccagagaggcaacagacaagcagctaccgcagatgtcaacacacaaggcgttcttccaggcatggtctggcaggacagagatgtgtaccttcaggggcccatctgggcaaagattccacacacggacggacattttcacccctctcccctcatgggtggattcggacttaaacaccctcctccacagattctcatcaagaacaccccggtacctgcgaatccttcgaccaccttcagtgcggcaaagtttgcttccttcatcacacagtactccacgggacaggtcagcgtggagatcgagtgggagctgcagaaggaaaacagcaaacgctggaatcccgaaattcagtacacttccaactacaacaagtctgttaatgtggactttactgtggacactaatggcgtgtattcagagcctcgccccattggcaccagatacctgactcgtaatctgtaa

SEQ ID NO: 252 - protein, 735 aa, Artificial Sequence
  source: /note="Description of Artificial Sequence: Synthetic polypeptide"
MAADGYLPDWLEDTLSEGIRQRWKLKPGPPPPEPAERHKDDSRGLVLPGYKYLGPFNGLDKGEPVNEADAAALEHDKAYDRQLDSGDNPYLKYNHADAEFQERLKEDTSFGGNLGRAVFQAKKRVLEPLGLVEEPVKTAPGKKRPVEHSPVEPDSSSGTGKAGQQPARKRLNFGQTGDADSVPDPQPLGQPPAAPSGLGTNTMATGSGAPMADNNEGADGVGNSSGNWHCDSTWMGDRVITTSTRTWALPTYNNHLYKQISSQSGASNDNHYFGYSTPWGYFDFNRFHCHFSPRDWQRLINNNWGFRPKRLNFKLFNIQVKEVTQNDGTTTIANNLTGTVQVFTDSEYQLPYVLGSAHQGCLPPFPADVFMVPQYGYLTLNNGSQAVGRSSFYCLEYFPSQMLRTGNNFTFSYTFEDVPFHSSYAHSQSLGRLMNPLIDQYLYYLSRTNTPSGTTTQSRLQFSQAGASDIRDQSRNWLPGPCYRQQRVSKTSADNNNSEYSWTGATKYHLNGRDSLVNPGPAMASHKDDEEKFFPQSGVLIFGKQGSEKTNVDIEKVMITDEEEIRTTNPVATEQYGSVSTNLQRGNRQAATADVNTQGVLPGMVWQDRDVYLQGPIWAKIPHTDGHFHPSPLMGGFGLKHPPPQILIKNTPVPANPSTTFSAAKFASFITQYSTGQVSVEIEWELQKENSKRWNPEIQYTSNYNKSVNVDFTVDTNGVYSEPRPIGTRYLTRNL

SEQ ID NO: 253 - DNA, 2208 bp, Artificial Sequence
  source: /note="Description of Artificial Sequence: Synthetic polynucleotide"
atggctgccgatggttatcttccagattggctcgaggacactctctctgaaggaataagacagcggtggaagctcaaacctggcccaccaccaccagagcccgcagagcggcataaggacgacagcaggggtcttgtgcttcctgggtacaagtacctcggacccttcaacggactcgacaagggagagccggtcaacgaggcagacgccgcggccctcgagcacgacaaagcctacgaccggcagctcgacagcggagacaacccgtacctcaagtacaaccacgccgacgcggagtttcaggagcgccttaaagaagatacgtcctttgggggcaacctcggacgagcagtcttccaggcgaaaaagagggtacttgaacctctgggcctggttgaggaacctgttaagacggctccgggaaaaaagaggccggtagagcactctcctgtggagccagactcctcctcgggaaccggaaaggcgggccagcagcctgcaagaaaaagattgaattttggtcagactggagacgcagactcagtacctgacccccagcctctcggacagccaccagcagccccctctggtctgggaactaatacgatggctacaggcagtggcgcaccaatggcagacaataacgagggcgccgacggagtgggtaattcctcgggaaattggcattgcgattccacatggatgggcgacagagtcatcaccaccagcacccgaacctgggccctgcccacctacaacaaccacctctacaaacaaatttccagccaatcaggagcctcgaacgacaatcactactttggctacagcaccccttgggggtattttgacttcaacagattccactgccacttttcaccacgtgactggcaaagactcatcaacaacaactggggattccgacccaagagactcaacttcaagctctttaacattcaagtcaaagaggtcacgcagaatgacggtacgacgacgattgccaataaccttaccagcacggttcaggtgtttactgactcggagtaccagctcccgtacgtcctcggctcggcgcatcaaggatgcctcccgccgttcccagcagacgtcttcatggtgccacagtatggatacctcaccctgaacaacgagagtcaggcagtaggacgctcttcattttactgcctggagtactttccttctcagatgctgcgtaccggaaacaactttaccttcagctacacttttgaggacgttcctttccacagcagctacgctcacagccagagtctgggccgtctcatgaatcctctcatcgaccagtacctgtattacttgagcagaacaaacactccaagtggaaccaccacgcagtcaaggcttcagttttctcaggccggagcgagtgacattcgggaccagtctaggaactggcttcctggaccctgttaccgccagcagcgagtatcaaagacatctgcggataacaacaacagtgaatactcgtggactggagctaccaagtaccacctcaatggcagagactctctggtgaatccgggcccggccatggcaagccacaaggacgatgaagaaaagttttttcctcagagcggggttctcatctttgggaagcaaggctcagagaaaacaaatgtggacattgaaaaggtcatgattacagacgaagaggaaatcaggacaaccaatcccgtggctacggagcagtatggttctgtatctaccaacctccagagaggcaacagacaagcagctaccgcagatgtcaacacacaaggcgttcttccaggcatggtctggcaggacagagatgtgtaccttcaggggcccatctgggcaaagattccacacacggacggacattttcacccctctcccctcatgggtggattcggacttaaacaccctcctccacagattctcatcaagaacaccccggtacctgcgaatccttcgaccaccttcagtgcggcaaagtttgcttccttcatcacacagtactccacgggacaggtcagcgtggagatcgagtgggagctgcagaaggaaaacagcaaacgctggaatcccgaaattcagtacacttccaactacaacaagtctgttaatgtggactttactgtggacactaatggcgtgtattcagagcctcgccccattggcaccagatacctgactcgtaatctgtaa

SEQ ID NO: 254 - protein, 735 aa, Artificial Sequence
  source: /note="Description of Artificial Sequence: Synthetic polypeptide"
MAADGYLPDWLEDTLSEGIRQRWKLKPGPPPPEPAERHKDDSRGLVLPGYKYLGPFNGLDKGEPVNEADAAALEHDKAYDRQLDSGDNPYLKYNHADAEFQERLKEDTSFGGNLGRAVFQAKKRVLEPLGLVEEPVKTAPGKKRPVEHSPVEPDSSSGTGKAGQQPARKRLNFGQTGDADSVPDPQPLGQPPAAPSGLGTNTMATGSGAPMADNNEGADGVGNSSGNWHCDSTWMGDRVITTSTRTWALPTYNNHLYKQISSQSGASNDNHYFGYSTPWGYFDFNRFHCHFSPRDWQRLINNNWGFRPKRLNFKLFNIQVKEVTQNDGTTTIANNLTSTVQVFTDSEYQLPYVLGSAHQGCLPPFPADVFMVPQYGYLTLNNESQAVGRSSFYCLEYFPSQMLRTGNNFTFSYTFEDVPFHSSYAHSQSLGRLMNPLIDQYLYYLSRTNTPSGTTTQSRLQFSQAGASDIRDQSRNWLPGPCYRQQRVSKTSADNNNSEYSWTGATKYHLNGRDSLVNPGPAMASHKDDEEKFFPQSGVLIFGKQGSEKTNVDIEKVMITDEEEIRTTNPVATEQYGSVSTNLQRGNRQAATADVNTQGVLPGMVWQDRDVYLQGPIWAKIPHTDGHFHPSPLMGGFGLKHPPPQILIKNTPVPANPSTTFSAAKFASFITQYSTGQVSVEIEWELQKENSKRWNPEIQYTSNYNKSVNVDFTVDTNGVYSEPRPIGTRYLTRNL

SEQ ID NO: 255 - DNA, 2208 bp, Artificial Sequence
  source: /note="Description of Artificial Sequence: Synthetic polynucleotide"
atggctgccgatggttatcttccagattggctcgaggacactctctctgaaggaataagacagcggtggaagctcaaacctggcccaccaccaccagagcccgcagagcggcataaggacgacagcaggggtcttgtgcttcctgggtacaagtacctcggacccttcaacggactcgacaagggagagccggtcaacgaggcagacgccgcggccctcgagcacgacaaagcctacgaccggcagctcgacagcggagacaacccgtacctcaagtacaaccacgccgacgcggagtttcaggagcgccttaaagaagatacgtcttttgggggcaacctcggacgagcagtcttccaggcgaaaaagagggtacttgaacctctgggcctggttgaggaacctgttaagacggctccgggaaaaaagaggccggtagagcactctcctgtggagccagactcctcctcgggaaccggaaaggcgggccagcagcctgcaagaaaaagattgaattttggtcagactggagacgcagactcagtacctgacccccagcctctcggacagccaccagcagccccctctggtctgggaactaatacgatggctacaggcagtggcgcaccaatggcagacaataacgagggcgccgacggagtgggtaattcctcgggaaattggcattgcgattccacatggatgggcgacagagtcatcaccaccagcacccgaacctgggccctgcccacctacaacaaccacctctacaaacaaatttccagccaatcaggagcctcgaacgacaatcactactttggctacagcaccccttgggggtattttgacttcaacagattccactgccacttttcaccacgtgactggcaaagactcatcaacaacaactggggattccgacccaagagactcaacttcaagctctttaacattcaagtcaaagaggtcacgcagaatgacggtacgacgacgattgccaataaccttaccagcacggttcaggtgtttactgactcggagtaccagctcccgtacgtcctcggctcggcgcatcaaggatgcctcccgccgttcccagcagacgtcttcatggtaccacagtatggatacctcaccctgaacaacgggagtcaggcagtaggacgctcttcattttactgcctggagtactttccttctcagatgctgcgtaccggaaacaactttaccttcagctacacttttgaggacgttcctttccacagcagctacgctcacagccagagtctgggccgtctcatgaatcctctcatcgaccagtacctgtattacttgagcagaacaaacactccaagtggaaccaccacgcagtcaaggcttcagttttctcaggccggagcgagtgacattcgggaccagtctaggaactggcttcctggaccctgttaccgccagcagcgagtatcaaagacatctgcggataacaacaacagtgaatactcgtggactggagctaccaagtaccacctcaatggcagagactctctggtgaatccgggcccggccatggcaagccacaaggacgatgaagaaaagttttttcctcagagcggggttctcatctttgggaagcaaggctcagagaaaacaaatgtggacattgaaaaggtcatgattacagacgaagaggaaatcaggacaaccaatcccgtggctacggagcagtatggttctgtatctaccaacctccagagaggcaacagacaagcagctaccgcagatgtcaacacacaaggcgttcttccaggcatggtctggcaggacagagatgtgtaccttcaggggcccatctgggcaaagattccacacacggacggacattttcacccctctcccctcatgggtggattcggacttaaacaccctcctccacagattctcatcaagaacaccccggtacctgcgaatccttcgaccaccttcagtgcggcaaagtttgcttccttcatcacacagtactccacgggacaggtcagcgtggagatcgagtgggagctgcagaaggaaaacagcaaacgctggaatcccgaaattcagtacacttccaactacaacaagtctgttaatgtggactttactgtggacactaatggcgtgtattcagagcctcgccccattggcaccagatacctgactcgtaatctgtaa

SEQ ID NO: 256 - protein, 735 aa, Artificial Sequence
  source: /note="Description of Artificial Sequence: Synthetic polypeptide"
MAADGYLPDWLEDTLSEGIRQRWKLKPGPPPPEPAERHKDDSRGLVLPGYKYLGPFNGLDKGEPVNEADAAALEHDKAYDRQLDSGDNPYLKYNHADAEFQERLKEDTSFGGNLGRAVFQAKKRVLEPLGLVEEPVKTAPGKKRPVEHSPVEPDSSSGTGKAGQQPARKRLNFGQTGDADSVPDPQPLGQPPAAPSGLGTNTMATGSGAPMADNNEGADGVGNSSGNWHCDSTWMGDRVITTSTRTWALPTYNNHLYKQISSQSGASNDNHYFGYSTPWGYFDFNRFHCHFSPRDWQRLINNNWGFRPKRLNFKLFNIQVKEVTQNDGTTTIANNLTSTVQVFTDSEYQLPYVLGSAHQGCLPPFPADVFMVPQYGYLTLNNGSQAVGRSSFYCLEYFPSQMLRTGNNFTFSYTFEDVPFHSSYAHSQSLGRLMNPLIDQYLYYLSRTNTPSGTTTQSRLQFSQAGASDIRDQSRNWLPGPCYRQQRVSKTSADNNNSEYSWTGATKYHLNGRDSLVNPGPAMASHKDDEEKFFPQSGVLIFGKQGSEKTNVDIEKVMITDEEEIRTTNPVATEQYGSVSTNLQRGNRQAATADVNTQGVLPGMVWQDRDVYLQGPIWAKIPHTDGHFHPSPLMGGFGLKHPPPQILIKNTPVPANPSTTFSAAKFASFITQYSTGQVSVEIEWELQKENSKRWNPEIQYTSNYNKSVNVDFTVDTNGVYSEPRPIGTRYLTRNL

SEQ ID NO: 257 - DNA, 2208 bp, Artificial Sequence
  source: /note="Description of Artificial Sequence: Synthetic polynucleotide"
atggctgccgatggttatcttccagattggctcgaggacactctctctgaaggaataagacagcggtggaagctcaaacctggcccaccaccaccagagcccgcagagcggcataaggacgacagcaggggtcttgtgcttcctgggtacaagtacctcggacccttcaacggactcgacaagggagagccggtcaacgaggcagacgccgcggccctcgagcacgacaaagcctacgaccggcagctcgacagcggagacaacccgtacctcaagtacaaccacgccgacgcggagtttcaggagcgccttaaagaagatacgtcttttgggggcaacctcggacgagcagtcttccaggcgaaaaagagggtactcgaacctctgggcctggttgaggaacctgttaagacggctccgggaaaaaagaggccggtagagcactctcctgtggagccagactcctcctcgggaaccggaaaggcgggccagcagcctgcaagaaaaagattgaattttggtcagactggagacgcagactcagtacctgacccccagcctctcggacagccaccagcagccccctctggtctgggaactaatacgatggctacaggcagtggcgcaccaatggcagacaataacgagggcgccgacggagtgggtaattcctcgggaaattggcattgcgattccacatggatgggcgacagagtcatcaccaccagcacccgaacctgggccctgcccacctacaacaaccacctctacaaacaaatttccagccaatcaggagcctcgaacgacaatcactactttggctacagcaccccttgggggtattttgacttcaacagattccactgccacttttcaccacgtgactggcaaagactcatcaacaacaactggggattccgacccaagagactcaacttcaagctctttaacattcaagtcaaagaggtcacgcagaatgacggtacgacgacgattgccaataaccttaccagcacggttcaggtgtttactgactcggagtaccagctcccgtacgtcctcggctcggcgcatcaaggatgcctcccgccgttcccagcagacgtcttcatggtgccacagtatggatacctcaccctgaacaacgggagtcaggcagcaggacgctcttcattttactgcctggagtactttccttctcagatgctgcgtaccggaaacaactttaccttcagctacacttttgaggacgttcctttccacagcagctacgctcacagccagagtctgggccgtctcatgaatcctctcatcgaccagtacctgtattacttgagcagaacaaacactccaagtggaaccaccacgcagtcaaggcttcagttttctcaggccggagcgagtgacattcgggaccagtctaggaactggcttcctggaccctgttaccgccagcagcgagtatcaaagacatctgcggataacaacaacagtgaatactcgtggactggagctaccaagtaccacctcaatggcagagactctctggtgaatccgggcccggccatggcaagccacaaggacgatgaagaaaagttttttcctcagagcggggttctcatctttgggaagcaaggctcagagaaaacaaatgtggacattgaaaaggtcatgattacagacgaagaggaaatcaggacaaccaatcccgtggctacggagcagtatggttctgtatctaccaacctccagagaggcaacagacaagcagctaccgcagatgtcaacacacaaggcgttcttccaggcatggtctggcaggacagagatgtgtaccttcaggggcccatctgggcaaagattccacacacggacggacattttcacccctctcccctcatgggtggattcggacttaaacaccctcctccacagattctcatcaagaacaccccggtacctgcgaatccttcgaccaccttcagtgcggcaaagtttgcttccttcatcacacagtactccacgggacaggtcagcgtggagatcgagtgggagctgcagaaggaaaacagcaaacgctggaatcccgaaattcagtacacttccaactacaacaagtccgttaatgtggactttactgtggacactaatggcgtgtattcagagcctcgccccattggcaccagatacctgactcgtaatctgtaa

SEQ ID NO: 258 - protein, 735 aa, Artificial Sequence
  source: /note="Description of Artificial Sequence: Synthetic polypeptide"
MAADGYLPDWLEDTLSEGIRQRWKLKPGPPPPEPAERHKDDSRGLVLPGYKYLGPFNGLDKGEPVNEADAAALEHDKAYDRQLDSGDNPYLKYNHADAEFQERLKEDTSFGGNLGRAVFQAKKRVLEPLGLVEEPVKTAPGKKRPVEHSPVEPDSSSGTGKAGQQPARKRLNFGQTGDADSVPDPQPLGQPPAAPSGLGTNTMATGSGAPMADNNEGADGVGNSSGNWHCDSTWMGDRVITTSTRTWALPTYNNHLYKQISSQSGASNDNHYFGYSTPWGYFDFNRFHCHFSPRDWQRLINNNWGFRPKRLNFKLFNIQVKEVTQNDGTTTIANNLTSTVQVFTDSEYQLPYVLGSAHQGCLPPFPADVFMVPQYGYLTLNNGSQAAGRSSFYCLEYFPSQMLRTGNNFTFSYTFEDVPFHSSYAHSQSLGRLMNPLIDQYLYYLSRTNTPSGTTTQSRLQFSQAGASDIRDQSRNWLPGPCYRQQRVSKTSADNNNSEYSWTGATKYHLNGRDSLVNPGPAMASHKDDEEKFFPQSGVLIFGKQGSEKTNVDIEKVMITDEEEIRTTNPVATEQYGSVSTNLQRGNRQAATADVNTQGVLPGMVWQDRDVYLQGPIWAKIPHTDGHFHPSPLMGGFGLKHPPPQILIKNTPVPANPSTTFSAAKFASFITQYSTGQVSVEIEWELQKENSKRWNPEIQYTSNYNKSVNVDFTVDTNGVYSEPRPIGTRYLTRNL

SEQ ID NO: 259 - protein, 738 aa, Artificial Sequence; identical to SEQ ID NO: 101
  source: /note="Description of Artificial Sequence: Synthetic polypeptide"

SEQ ID NO: 260 - DNA, 2217 bp, Artificial Sequence
  source: /note="Description of Artificial Sequence: Synthetic polynucleotide"
atggctgctgacggttatcttccagattggctcgaggacaacctctctgagggcattcgcgagtggtgggacctgaaacctggagcccccaagcccaaggccaaccagcagaagcaggacgacggccggggtctggtgcttcctggctacaagtacctcggacccttcaacggactcgacaagggggagcccgtcaacgcggcggacgcagcggccctcgagcacgacaaggcctacgaccagcagctcaaagcgggtgacaatccgtacctgcggtataaccacgccgacgccgagtttcaggagcgtctgcaagaagatacgtcttttgggggcaacctcgggcgagcagtcttccaggccaagaagcgggttctcgaacctctcggtctggttgaggaagctgctaagacggctcctggaaagaagagaccggtagaaccgtcacctcagcgttcccccgactcctccacgggcatcggcaagaaaggccagcagcccgctaaaaagagactgaactttggtcagactggcgactcagagtcagtccccgaccctcaaccaatcggagaaccaccagcaggcccctctggtctgggatctggtacaatggctgcaggcggtggcgctccaatggcagacaataacgaaggcgccgacggagtgggtagttcctcaggaaattggcattgcgattccacatggctgggcgacagagtcatcaccaccagcacccgaacctgggccctgcccacctacaacaaccacctctacaagcaaatatccaatgggacatcgggaggaagcaccaacgacaacacctacttcggctacagcaccccctgggggtattttgacttcaacagattccactgccacttctcaccacgtgactggcagcgactcatcaacaacaactggggattccggccaaaaagactcagcttcaagctcttcaacatccaggtcaaggaggtcacgcagaatgaaggcaccaagaccatcgccaataaccttaccagcacgattcaggtatttacggactcggaataccagctgccgtacgtcctcggctccgcgcaccagggctgcctgcctccgttcccggcggacgtcttcatgattccccagtacggctaccttacactgaacaatggaagtcaagccgtaggccgttcctccttctactgcctggaatattttccatctcaaatgctgcgaactggaaacaattttgaattcagctacaccttcgaggacgtgcctttccacagcagctacgcacacagccagagcttggaccgactgatgaatcctctcatcgaccagtacctgtactacttatccagaactcagtccacaggaggaactcaaggtacccagcaattgttattttctcaagctgggcctgcaaacatgtcggctcaggctaagaactggctacctggaccttgctaccggcagcagcgagtctctacgacactgtcgcaaaacaacaacagcaactttgcttggactggtgccaccaaatatcacctgaacggaagagactctttggtaaatcccggtgtcgccatggcaacccacaaggacgacgaggaacgcttcttcccgtcgagtggagtcctgatgttcggaaaacagggtgctggaagagacaatgtggactacagcagcgttatgctaaccagcgaagaagaaattaaaaccactaaccccgtagccacagaacaatacggtgtggtggctgacaacttgcagcaaaccaatacagggcctattgtgggaaatgtcaacagccaaggagccttacctggcatggtctggcagaaccgagacgtgtacctgcagggtcccatctgggccaagattcctcacacggacggcaacttccacccttcaccgctaatgggaggatttggactgaagcacccacctcctcagatcctgatcaagaacacgccggtacctgcggatcctccaacaacgttcagccaggcgaaattggcttccttcattacgcagtacagcaccggacaggtcagcgtggaaatcgagtgggagctgcagaaggagaacagcaaacgctggaacccagagattcagtacacttcaaactactacaaatctacaaatgtggactttgctgtcaatacagagggaacttattctgagcctcgccccattggtactcgttacctcacccgtaatctgtaa

SEQ ID NO: 261 - protein, 738 aa, Artificial Sequence
  source: /note="Description of Artificial Sequence: Synthetic polypeptide"
MAADGYLPDWLEDNLSEGIREWWDLKPGAPKPKANQQKQDDGRGLVLPGYKYLGPFNGLDKGEPVNAADAAALEHDKAYDQQLKAGDNPYLRYNHADAEFQERLQEDTSFGGNLGRAVFQAKKRVLEPLGLVEEAAKTAPGKKRPVEPSPQRSPDSSTGIGKKGQQPAKKRLNFGQTGDSESVPDPQPIGEPPAGPSGLGSGTMAAGGGAPMADNNEGADGVGSSSGNWHCDSTWLGDRVITTSTRTWALPTYNNHLYKQISNGTSGGSTNDNTYFGYSTPWGYFDFNRFHCHFSPRDWQRLINNNWGFRPKRLSFKLFNIQVKEVTQNEGTKTIANNLTSTIQVFTDSEYQLPYVLGSAHQGCLPPFPADVFMIPQYGYLTLNNGSQAVGRSSFYCLEYFPSQMLRTGNNFEFSYTFEDVPFHSSYAHSQSLDRLMNPLIDQYLYYLSRTQSTGGTQGTQQLLFSQAGPANMSAQAKNWLPGPCYRQQRVSTTLSQNNNSNFAWTGATKYHLNGRDSLVNPGVAMATHKDDEERFFPSSGVLMFGKQGAGRDNVDYSSVMLTSEEEIKTTNPVATEQYGVVADNLQQTNTGPIVGNVNSQGALPGMVWQNRDVYLQGPIWAKIPHTDGNCHPSPLMGGFGLKHPPPQILIKNTPVPADPPTTFSQAKLASFITQYSTGQVSVEIEWELQKENSKRWNPEIQYTSNYYKSTNVDFAVNTEGTYSEPRPIGTRYLTRNL

SEQ ID NO: 262 - protein, 738 aa, Artificial Sequence
  source: /note="Description of Artificial Sequence: Synthetic polypeptide"
MAADGYLPDWLEDNLSEGIREWWDLKPGAPKPKANQQKQDDGRGLVLPGYKYLGPFNGLDKGEPVNAADAAALEHDKAYDQQLKAGDNPYLRYNHADAEFQERLQEDTSFGGNLGRAVFQAKKRVLEPLGLVEEGAKTAPGKKRPVEPSPQRSPDSSTGIGKKGQQPARKRLNFGRTGDSESVPDPQPIGEPPAAPSSVGSGTMAAGGGAPMADNNEGADGVGSSSGNWHCDSTWLGDRVITTSTRTWALPTYNNHLYKQISNGTSGGSTNDNTYFGYSTPWGYLDFNRFHCHFSPRDWQRLINNNWGFRPKRLSFKLFNIQVKEVTQNEGTKTIANNLASTIQVFTDSEYQPPYVLGSAHQGCLPPFPADVFMIPQYGYLTLNNGSQAVGRSSFYCLEYFPSQMLRTGNNFSFSYTFEDVPFHSSYAHSQSLDRLMNPLIDQYLYYLSRTQSTGGTAGTQQLLFSRAGPSNMSAQARNWLPGPCYRQQRVSTTLSQNNNSNFAWTGATKYHLNGRDSLVNPGVAMATNKDDEDRFFPSSGILMFGKQGAGKDNVDYSNVMLTSEEEIKTTNPVATEQYGVVADNLQQQNTAPTVGAVNSQGALPGMVWQNRDVYLQGPIWAKIPHTDGNFHPSPLMGGFGLKHPPPQILIKNTPVPADPPTAFNQAKLNSFIAQYSTGQVSVEIEWELQKENSKRWNPEIQYTSNYYKSTNADFAVNTEGVYSEPRPIGTRYLTRNL

SEQ ID NO: 263 - DNA, 2217 bp, Artificial Sequence
  source: /note="Description of Artificial Sequence: Synthetic polynucleotide"
atggctgccgatggttatcttccagattggctcgaggacaacctctctgagggcattcgcgagtggtgggacctgaaacctggagccccgaaacccaaagccaaccagcaaaagcaggacgacggccggggtctggtgcttcctggctacaagtacctcggacccttcaacggactcgacaagggggagcccgtcaacgcggcggacgcagcggccctcgagcacgacaaggcctacgaccagcagctcaaagcgggtgacaatccgtacctgcggtataatcacgccgacgccgagtttcaggagcgtctgcaagaagatacgtcttttgggggcaacctcgggcgagcagtcttccaggccaagaagcgggttctcgaacctctcggtctggttgaggaaggcgctaagacggctcctggaaagaagagaccggtagagccgtcaccacagcgttcccccgactcctccacgggcatcggcaagaaaggccagcagcccgccagaaagagactcaatttcggtcggactggcgactcagagtcagtccccgaccctcaacctatcggagaacctccagcagcgccctctagtgtgggatctggtacaatggctgcaggcggtggcgcaccaatggcagacaataacgaaggtgccgacggagtgggtagttcctcgggaaattggcattgcgattccacatggctgggcgacagagttatcaccaccagcacccgaacctgggccctgcccacctacaacaaccacctctacaagcaaatctccaacgggacctcgggaggcagcaccaacgacaacacctactttggctacagcaccccctgggggtatcttgactttaacagattccactgccacttctcaccacgtgactggcagcgactcatcaacaacaactggggattccggcccaagagactcagcttcaagctcttcaacatccaggtcaaagaggtcacgcagaatgaaggcaccaagaccatcgccaataacctcgccagcaccatccaggtgtttacggactcggaataccagccgccgtacgtcctcggctctgcccaccagggctgcctgcctccgttcccggcggacgtcttcatgattcctcagtacggctacctgactctcaacaacggtagtcaggccgtgggacgttcctccttctactgcctggagtacttcccctctcagatgctgagaacgggcaacaacttttccttcagctacactttcgaggacgtgcctttccacagcagctacgcgcacagccagagtttggacaggctgatgaatcctctcatcgaccagtacctgtactacctgtcaagaacccagtctacgggaggcacagcgggaacccagcagttgctgttttctcgggccgggcctagcaacatgtcggctcaggccagaaactggctgcctggaccctgctacagacagcagcgcgtctccacgacactgtcgcaaaacaacaacagcaactttgcctggactggtgccaccaagtatcatctgaacggcagagactctctggtgaatccgggcgtcgccatggcaaccaacaaggacgacgaggaccgcttcttcccatccagcggcatcctcatgtttggcaagcagggagctggaaaagacaacgtggactatagcaacgtgatgctaaccagcgaggaagaaatcaagaccaccaaccccgtggccacagaacagtatggcgtggtggctgataacctacagcagcaaaacaccgctcctactgtgggggccgtcaacagccagggagccttacctggcatggtctggcagaaccgggacgtgtacctgcagggtcctatttgggccaagattcctcacacagatggcaactttcacccgtctcctttaatgggcggctttggacttaaacatccgcctcctcagatcctcatcaaaaacactcctgttcctgcggatcctccaacagcgttcaaccaggccaagctgaattctttcatcgcgcagtacagcaccggacaagtcagcgtggagatcgagtgggagctgcagaaggagaacagcaagcgctggaacccagagattcagtatacttccaactactacaaatctacaaatgcggactttgctgttaatactgagggtgtttactctgagcctcgccccattggcactcgttacctcacccgtaatctgtaa

SEQ ID NO: 264 - DNA, 2208 bp, Artificial Sequence
  source: /note="Description of Artificial Sequence: Synthetic polynucleotide"
atggctgccgatggttatcttccagattggctcgaggacactctctctgaaggaataagacagtggtggaagctcaaacctggcccaccaccaccaaagcccgcagagcggcataaggacgacagcaggggtcttgtgcttcctgggtacaagtacctcggacccttcaacggactcgacaagggggagccggtcaacgaggcagacgccgcggccctcgagcacgacaaggcctacgaccggcagctcgacagcggagacaacccgtacctcaagtacaaccacgccgacgcagagtttcaggagcgccttaaagaagatacgtcttttgggggcaacctcggacgagcagtcttccaggcgaaaaagagggttcttgaacctctgggcctggttgaggagcctgttaagacggctccgggaaaaaagaggccggtagagcactctcctgtggagccagactcctcctcgggaaccggaaaagcgggccagcagcctgcaagaaaaagattaaattttggtcagactggagacgcagactccgtacctgacccccagcctctcggacagccaccagcagccccctctggtctgggatctactacaatggctacaggcagtggcgcaccaatggcagacaataacgagggtgccgatggagtgggtaattcctcaggaaattggcattgcgattcccaatggctgggcgacagagtcatcaccaccagcacccgaacctgggccctgcccacatacaacaaccacctctacaagcaaatctccagccaatcaggagccagcaacgacaaccactactttggctacagcaccccctgggggtattttgacttcaacagattccactgccacttttcaccacgtgactggcaaagactcgtcaacaacaaccggggattccggcccaaaagactcaacttcaagctctttaatattcaagtcaaagaggtcacgcagaatgacggtacgacgacgattgccaataaccttaccagcacggttcaggtgtttactgactcggagtaccagctcccgtacgtcctgggctcggcgcatcaaggatgcctcccgccgtttccagcggacgtcttcatggtcccacagtatggatacctcaccctgaacaacgggagtcaggcggtaggacgctcttccttttactgcctggagtactttccttctcagatgctgcgtactggaaacaactttcagttcagctacacttttgaagacgtgcctttccacagcagctacgctcacagccagagtctggatcggctgatgaatcctctgatcgaccagtacctgtattatctgaacaagacacaaacaaatagtggaactcttcagcagtctcggctactgtttagccaagctggaccaaccaacatgtctcttcaagctaaaaactggctgcctggaccttgctacagacagcagcgtctgtcaaaacaggcaaacgacaacaacaacagcaactttccctggactgcagctacaaagtatcatctaaatggccgggactcgttggttaatccaggaccagctatggccagtcacaaggatgacgaagaaaagtttttccccatgcatggaaccctgatatttggtaaacaaggaacaaatgccaacgacgcggatttggaaaatgtcatgattacagatgaagaagaaatcagggccaccaatcccgtggctacggagcagtacgggactgtgtcaaataatttgcaaaactcaaacactggtccaactactggaactgtcaatcaccaaggagcgttacctggtatggtgtggcaggatcgagacgtgtacctgcagggacccatttgggccaagattcctcacaccgatggacactttcatccttctccactgatgggaggttttggactcaaacacccgcctcctcagatcatgatcaaaaacactcccgttccagccaatcctcccacaaacttcagttctgccaagtttgcttctttcatcacacagtattccacgggacaggtcagcgtggagatcgagtgggagctgcagaaggagaacagcaaacgctggaatcccgaaattcagtacacttccaactacaacaagtctgttaatgtggactttactgtggacactaatggtgtgtattcagagcctcgccccattggcaccagatacctgactcgtaatctgtaa

SEQ ID NO: 265 - protein, 735 aa, Artificial Sequence
  source: /note="Description of Artificial Sequence: Synthetic polypeptide"
MAADGYLPDWLEDTLSEGIRQWWKLKPGPPPPKPAERHKDDSRGLVLPGYKYLGPFNGLDKGEPVNEADAAALEHDKAYDRQLDSGDNPYLKYNHADAEFQERLKEDTSFGGNLGRAVFQAKKRVLEPLGLVEEPVKTAPGKKRPVEHSPVEPDSSSGTGKAGQQPARKRLNFGQTGDADSVPDPQPLGQPPAAPSGLGSTTMATGSGAPMADNNEGADGVGNSSGNWHCDSQWLGDRVITTSTRTWALPTYNNHLYKQISSQSGASNDNHYFGYSTPWGYFDFNRFHCHFSPRDWQRLVNNNRGFRPKRLNFKLFNIQVKEVTQNDGTTTIANNLTSTVQVFTDSEYQLPYVLGSAHQGCLPPFPADVFMVPQYGYLTLNNGSQAVGRSSFYCLEYFPSQMLRTGNNFQFSYTFEDVPFHSSYAHSQSLDRLMNPLIDQYLYYLNKTQTNSGTLQQSRLLFSQAGPTNMSLQAKNWLPGPCYRQQRLSKQANDNNNSNFPWTAATKYHLNGRDSLVNPGPAMASHKDDEEKFFPMHGTLIFGKQGTNANDADLENVMITDEEEIRATNPVATEQYGTVSNNLQNSNTGPTTGTVNHQGALPGMVWQDRDVYLQGPIWAKIPHTDGHFHPSPLMGGFGLKHPPPQIMIKNTPVPANPPTNFSSAKFASFITQYSTGQVSVEIEWELQKENSKRWNPEIQYTSNYNKSVNVDFTVDTNGVYSEPRPIGTRYLTRNL

SEQ ID NO: 266 - protein, 738 aa, Artificial Sequence
  source: /note="Description of Artificial Sequence: Synthetic polypeptide"
MAADGYLPDWLEDNLSEGIREWWDLKPGAPKPKANQQKQDDGRGLVLPGYKYLGPFNGLDKGEPVNAADAAALEHDKAYDQQLKAGDNPYLRYNHADAEFQERLQEDTSFGGNLGRAVFQAKKRVLEPLGLVEEAAKTAPGKKRPVEPSPQRSPDSSTGIGKKGQQPAKKRLSFGQTGDSESVPDPQPIGEPPAGPSGLGSGTMAAGGGAPMADNNEGADGVGSSSGNWHCDSTWLGDRVITTSTRTWALPTYNNHLYKQISNGTSGGSTNDNTYFGYSTPWGYFDFNRFHCHFSPRDWQRLINNNWGFRPKRLSFKLFNIQVKEVTQNEGTKTIANNLTSTIQVFTDSEYQLPYVLGSAHQGCLPPFPADVFMIPQYGYLTLNNGSQAVGRSSFYCLEYFPSQMLRTGNNSEFSYTFEDVPFHSSYAHSQSLDRLMNPLIDQYLYYLSRTQSTGGTQGTQQLLFSQAGPANMSAQAKNWLPGPCYRQQRVSTTLSQNNNSNFAWTGATKYHLNGRDSLVNPGVAMATHKDDEERFFPSSGVLMFGKQGAGRDNVDYSSVMLTSEEEIKTTNPVATEQYGVVADNLQQTNTGPIVGNVNSQGALPGMVWQNRDVYLQGPIWAKIPHTDGNFHPSPLMGGFGLKHPPPQILIKNTPVPADPPTTFSQAKLASFITQYSTGQVSVEIEWELQKENSKRWNPEIQYTSNYYKSTNVDFAVNTEGTYSEPRPIGTRYLTRNL

SEQ ID NO: 267 - DNA, 2217 bp, Artificial Sequence
  source: /note="Description of Artificial Sequence: Synthetic polynucleotide"
atggctgctgacggttatcttccagattggctcgaggacaacctctctgagggcattcgcgagtggtgggacctgaaacctggagcccccaagcccaaggccaaccagcagaagcaggacgacggccggggtctggtgcttcctggctacaagtacctcggacccttcaacggactcgacaagggggagcccgtcaacgcggcggacgcagcggccctcgagcacgacaaggcctacgaccagcagctcaaagcgggtgacaatccgtacctgcggtataaccacgccgacgccgagtttcaggagcgtctgcaagaagatacgtcttttgggggcaacctcgggcgagcagtcttccaggccaagaagcgggttctcgaacctctcggtctggttgaggaagctgctaagacggctcctggaaagaagagaccggtagaaccgtcacctcagcgttcccccgactcctccacgggcatcggcaagaaaggccagcagcccgctaaaaagagactgagctttggtcagactggcgactcagagtcagtccccgaccctcaaccaatcggagaaccaccagcaggcccctctggtctgggatctggtacaatggctgcaggcggtggcgctccaatggcagacaataacgaaggcgccgacggagtgggtagttcctcaggaaattggcattgcgattccacatggctgggcgacagagtcatcaccaccagcacccgaacctgggccctgcccacctacaacaaccacctctacaagcaaatatccaatgggacatcgggaggaagcaccaacgacaacacctacttcggctacagcaccccctgggggtattttgacttcaacagattccactgccacttctcaccacgtgactggcagcgactcatcaacaacaactggggattccggccaaaaagactcagcttcaagctcttcaacatccaggtcaaggaggtcacgcagaatgaaggcaccaagaccatcgccaataaccttaccagcacgattcaggtatttacggactcggaataccagctgccgtacgtcctcggctccgcgcaccagggctgcctgcctccgttcccggcggacgtcttcatgattccccagtacggctaccttacactgaacaatggaagtcaagccgtaggccgttcctccttctactgcctggaatattttccatctcaaatgctgcgaactggaaacaattctgaattcagctacaccttcgaggacgtgcctttccacagcagctacgcacacagccagagcttggaccgactgatgaatcctctcatcgaccagtacctgtactacttatccagaactcagtccacaggaggaactcaaggtacccagcaattgttattttctcaagctgggcctgcaaacatgtcggctcaggctaagaactggctacctggaccttgctaccggcagcagcgagtctctacgacactgtcgcaaaacaacaacagcaactttgcttggactggtgccaccaaatatcacctgaacggaagagactctttggtaaatcccggtgtcgccatggcaacccacaaggacgacgaggaacgcttcttcccgtcgagtggagtcctgatgtttggaaaacagggtgctggaagagacaatgtggactacagcagcgttatgctaaccagcgaagaagaaattaaaaccactaaccctgtagccacagaacaatacggtgtggtggctgacaacttgcagcaaaccaatacagggcctattgtgggaaatgtcaacagccaaggagccttacctggcatggtctggcagaaccgagacgtgtacctgcagggtcccatctgggccaagattcctcacacggacggcaacttccacccttcaccgctaatgggaggatttggactgaagcacccacctcctcagatcctgatcaagaacacgccggtacctgcggatcctccaacaacgttcagccaggcgaaattggcttccttcattacgcagtacagcaccggacaggtcagcgtggaaatcgagtgggagctgcagaaggagaacagcaaacgctggaacccagagattcagtacacttcaaactactacaaatctacaaatgtggactttgctgtcaatacagagggaacttattctgagcctcgccccattggtactcgttacctcacccgtaatctgtaa

SEQ ID NO: 268 - protein, 738 aa, Artificial Sequence
  source: /note="Description of Artificial Sequence: Synthetic polypeptide"
MAADGYLPDWLEDNLSEGIREWWDLKPGAPKPKANQQKQDDGRGLVLPGYKYLGPFNGLDKGEPVNAADAAALEHDKAYDQQLKAGDNPYLRYNHADAEFQERLQEDTSFGGNLGRAVFQAKKRVLEPLGPVEEAAKTAPGKKRPVEPPPQRSPDSSTGIGKKGQQPAKKRLNFGQTGDSESVPDPQPIGEPPAGPSGLGSGTMAAGGGAPMADNNEGADGVGSSSGNWHCDSTWLGDRVITTSTRTWALPTYNNHLYKQISNGTSGGSTNDNTYFGYSTPWGYFDFNRFHCHFSPRDWQRLINNNWGFRPKRLSFKLFNIQVKEVTQNEGTKTVANNLTSTIQVFTDSEYQLPYVLGSAHQGCLPPFPADVFMIPQYGYLTLNNGSQAVGRSSFYCLEYFPSQMLRTGNNFEFSYTFEDVPFHSSYAHSQSLDRLMNPLIDQYLYYLSRTQSTGGTQGTQQLLFSQAGPANMSAQAKNWLPGPCYRQQRVSTTLSQNNNSNFAWTGATKYHLNGRDSLVNPGVAMATHKDDEERFFPSSGVLMFGKQGAGRDNVDYSSVMLTSEEEIKTTNPVATEQYGVVADNLQQTNTGPIVGNVNSQGALPGMVWQNRDVYLQGPIWAKIPHTDGNFHPSPLMGGFGLKHPPPQILIKNTPVPADPPTTFSQAKLASFITQYSTGQVSVEIEWELQKENSKRWNPEIQYTSNYYKSTNVDFAVNTEGTYSEPRPIGTRYLTRNL

SEQ ID NO: 269 - DNA, 2217 bp, Artificial Sequence
  source: /note="Description of Artificial Sequence: Synthetic polynucleotide"
atggctgctgacggttatcttccagattggctcgaggacaacctctctgagggcattcgcgagtggtgggacctgaaacctggagcccccaagcccaaggccaaccagcagaagcaggacgacggccggggtctggtgcttcctggctacaagtacctcggacccttcaacggactcgacaagggggagcccgtcaacgcggcggacgcagcggccctcgagcacgacaaggcctacgaccagcagctcaaagcgggtgacaatccgtacctgcggtataaccacgccgacgccgagtttcaggagcgtctacaagaagatacgtcttttgggggcaacctcgggcgagcagtcttccaggccaagaagcgggttctcgaacctctcggtccggttgaggaagctgctaagacggctcctggaaagaagagaccggtagaaccgccacctcagcgttcccccgactcctccacgggcatcggcaagaaaggccagcagcccgctaaaaagagactgaactttggtcagactggcgactcagagtcagtccccgaccctcaaccaatcggagaaccaccagcaggcccctctggtctgggatctggtacaatggctgcaggcggtggcgctccaatggcagacaataacgaaggcgccgacggagtgggtagttcctcaggaaattggcattgcgattccacatggctgggcgacagagtcatcaccaccagcacccgaacctgggccctgcccacctacaacaaccacctctacaagcaaatatccaatgggacatcgggaggaagcaccaacgacaacacctacttcggctacagcaccccctgggggtattttgacttcaacagattccactgccacttctcaccacgtgactggcagcgactcatcaacaacaactggggattccggccaaaaagactcagcttcaagctcttcaacatccaggtcaaggaggtcacgcagaatgaaggcaccaagaccgtcgccaataaccttaccagcacgattcaggtatttacggactcggaataccagctgccgtacgtcctcggctccgcgcaccagggctgcctgcctccgttcccggcggacgtcttcatgattccccagtacggctaccttacactgaacaatggaagtcaagccgtaggccgttcctccttctactgcctggaatattttccatctcaaatgctgcgaactggaaacaattttgaattcagctacaccttcgaggacgtgcctttccacagcagctacgcacacagccagagcttggaccgactgatgaatcctctcatcgaccagtacctgtactacttatccagaactcagtccacaggaggaactcaaggtacccagcaattgttattttctcaagctgggcctgcaaacatgtcggctcaggctaagaactggctacctggaccttgctaccggcagcagcgagtctctacgacactgtcgcaaaacaacaacagcaactttgcttggactggtgccaccaaatatcacctgaacggaagagactctttggtaaatcccggtgtcgccatggcaacccacaaggacgacgaggaacgcttcttcccgtcgagtggagtcctgatgtttggaaaacagggtgctggaagagacaatgtggactacagcagcgttatgctaaccagcgaagaagaaattaaaaccactaaccctgtagccacagaacaatacggtgtggtggctgacaacttgcagcaaaccaatacagggcctattgtgggaaatgtcaacagccaaggagccttacctggcatggtctggcagaaccgagacgtgtacctgcagggtcccatctgggccaagattcctcacacggacggcaacttccacccttcaccgctaatgggaggatttggactgaagcacccacctcctcagatcctgatcaagaacacgccggtacctgcggatcctccaacaacgttcagccaggcgaaattggcttccttcattacgcagtacagcaccggacaggtcagcgtggaaatcgagtgggagctgcagaaggagaacagcaaacgttggaacccagagattcagtacacttcaaactactacaaatctacaaatgtggactttgctgtcaatacagagggaacttattctgagcctcgccccattggtactcgttacctcacccgtaatctgtaa

SEQ ID NO: 270 - protein, 738 aa, Artificial Sequence
  source: /note="Description of Artificial Sequence: Synthetic polypeptide"
MAADGYLPDWLEDNLSEGIREWWDLKPGAPKPKANQQKQDDGRGLVLPGYKYLGPFNGLDKGEPVNAADAAALEHDKAYDQQLKAGDNPYLRYNHADAEFQERLQEDTSFGGNLGRAVFQAKKRVLEPLGLVEEAAKTAPGKKRPVEPSPQRSPDSSTGIGKKGQQPAKKRLNFGQTGDSESVPDPQPIGEPPAGPSGLGSGTMAAGGGAPMADNNEGADGVGSSSGNWHCDSTWLGDRVITTSTRTWALPTYNNHLYKQISNGTSGGSTNDNTYFGYSTPWGYFDFNRFHCHFSPRDWQRLINNNWGFRPKRLSFKLFNIQVKEVTQNEGTKTIANNLTSTIQVFTDSEYQLPYVLGSAHQGCLPPFPADVFMIPQYGYLTLNNGSQAVGRSSFYCLEYFPSQMLRTGNNFEFSYTFEDVPFHSSYAHSQSLDRLMNPLIDQYLYYLSRTQSTGGTQGTQQLLFSQAGPANMSAQAKNWLPGPCYRQQRVSTTLSQSNNSNFAWTGATKYHLNGRDSLVNPGVAMATHKDDEERFFPSSGVLMFGKQGAGRDNVDYSSVMLTSEEEIKTTNPVATEQYGVVADNLQQTNTGPIVGNVNSQGALPGMVWQNRDVYLQGPIWAKIPHTDGNFHPSPLMGGLGLKHPPPQILIKNTPVPADPPTTFSQAKLASFITQYSTGQVSVEIEWELQKENSKRWNPEIQYTSNYYKSTNVDFAVNTEGTYSEPRPIGTRYLTRNL

SEQ ID NO: 271 - DNA, 2217 bp, Artificial Sequence
  source: /note="Description of Artificial Sequence: Synthetic polynucleotide"
atggctgctgacggttatcttccagattggctcgaggacaacctctctgagggcattcgcgagtggtgggacctgaaacctggagcccccaagcccaaggccaaccagcagaagcaggacgacggccggggtctggtgcttcctggctacaagtacctcggacccttcaacggactcgacaagggggagcccgtcaacgcggcggacgcagcggccctcgagcacgacaaggcctacgaccagcagctcaaagcgggtgacaatccgtacctgcggtataaccacgccgacgccgagtttcaggagcgtctgcaagaagatacgtcttttgggggcaacctcgggcgagcagtcttccaggccaagaagcgggttctcgaacctctcggtctggttgaggaagcggctaagacggctcctggaaagaagagaccggtagaaccgtcacctcagcgttcccccgactcctccacgggcatcggcaagaaaggccagcagcccgctaaaaagagactgaactttggtcagactggcgactcagagtcagtccccgaccctcaaccaatcggagaaccaccagcaggcccctctggtctgggatctggtacaatggctgcaggcggtggcgctccaatggcagacaataacgaaggcgccgacggagtgggtagttcctcaggaaattggcattgcgattccacatggctgggcgacagagtcatcaccaccagcacccgaacctgggccctgcccacctacaacaaccacctctacaagcaaatatccaatgggacatcgggaggaagcaccaacgacaacacctacttcggctacagcaccccctgggggtattttgacttcaacagattccactgccacttctcaccacgtgactggcagcgactcatcaacaacaactggggattccggccaaaaagactcagcttcaagctcttcaacatccaggtcaaggaggtcacgcagaatgaaggcaccaagaccatcgccaataaccttaccagcacgattcaggtatttacggactcggaataccagctgccgtacgtcctcggctccgcgcaccagggctgcctgcctccgttcccggcggacgtcttcatgattccccagtacggctaccttacactgaacaatggaagtcaagccgtaggccgttcctccttctactgcctggaatattttccatctcaaatgctgcgaactggaaacaattttgaattcagctacaccttcgaggacgtgcctttccacagcagctacgcacacagccagagcttggaccgactgatgaatcctctcatcgaccagtacctgtactacttatccagaactcagtccacaggaggaactcaaggtacccagcaattgttattttctcaagctgggcctgcaaacatgtcggctcaggctaagaactggctacctggaccttgctaccggcagcagcgagtctctacgacactgtcgcaaagcaacaacagcaactttgcttggactggtgccaccaaatatcacctgaacggaagagactctttggtaaatcccggtgtcgccatggcaacccacaaggacgacgaggaacgcttcttcccgtcgagtggagtcctgatgtttggaaaacagggtgctggaagagacaatgtggactacagcagcgttatgctaaccagcgaagaagaaattaaaaccactaaccctgtagccacagaacaatacggtgtggtggctgacaacttgcagcaaaccaatacagggcctattgtgggaaatgtcaacagccaaggagccttacctggcatggtctggcagaaccgagacgtgtacctgcagggtcccatctgggccaagattcctcacacggacggcaacttccacccttcaccgctaatgggaggacttggactgaagcacccacctcctcagatcctgatcaagaacacgccggtacctgcggatcctccaacaacgttcagccaggcgaaattggcttccttcattacgcagtacagcaccggacaggtcagcgtggaaatcgagtgggagctgcagaaggagaacagcaaacgctggaacccagagattcagtacacttcaaactactacaaatctacaaatgtggactttgctgtcaatacagagggaacttattctgagcctcgccccattggtactcgttacctcacccgtaatctgtaa

SEQ ID NO: 272 - protein, 737 aa, Artificial Sequence
  source: /note="Description of Artificial Sequence: Synthetic polypeptide"
MAADGYLPDWLEDNLSEGIREWWDLKPGAPKPKANQQKQDDGRGLVLPGYKYLGPFNGLDKGEPVNAADAAALEHDKAYDQQLKAGDNPYPRYNHADAEFQERLQEDTPFGGNLGRAVFQAKKRVLEPLGLVEEAAKTAPGKKRPVEPSPQRSPDSSTGIGKKGQQPAKKRLNFGQTGDSESVPDPQPIGEPPAGPSGLGSGTMAAGGGAPMADNNEGADGVGNASGNWHCDSTWLGDRVITTSTRTWALPTYNNHLYKQISSASTGASNDNHYFGYSTPWGYFDFNRFHCHFSPRDWQRLINNNWGFRPKRLNFKLFNIQVKEVTTNDGVTTIANNLTSTVQVFSDSEYQLPYVLGSAHQGCLPPFPADVFMIPQYGYLTLNNGSQAVGRSSFYCLEYFPSQMLRTGNNFTFSYTFEEVPLHSSYAHSQSLDRLMNPLIVQYLYYLNRTQNQSGSAQNKDLLFSRGSPAGMSVQPKNWLPGPCYRQQRVSKTKTDNNNSNFTWTGASKYNLNGRESIINPGTAMASHKDDEDKFFPMSGVMIFGKESAGASNTALDNVMITDEEEIKATNPVATERFGTVAVNFQSSSTDPATGDVHAMGALPGMVWQDRDVYLQGPIWAKIPHTDGHFHPSPLMGGFGLKNPPPQILIKNTPVPANPPAEFSATKFASFITQYSTGQVSVEIEWELQKENSKRWNPEVQYTSNYAKSASVDFTVDNNGLYTEPRPIGTRYLTRPL

SEQ ID NO: 273 - protein, 737 aa, Artificial Sequence
  source: /note="Description of Artificial Sequence: Synthetic polypeptide"
MAADGYLPDWLEDNLSEGIREWWDLKPGAPKPKANQQKQDDGRGLVLPGYKYLGPFNGLDKGEPVNAADAAALEHDKAYDQQLKAGDNPYPRYNHADAEFQERLQEDTSFGGNLGRAVFQAKKRVLEPLGLVEEAAKTAPGKKRPVEPSPQRSPDSSTGIGKKGQQPAKKRLNFGQTGDSESVPDPQPIGEPPAGPSGLGSGTMAAGGGAPMADNNEGADGVGNASGNWHCDSTWLGDRVITTSTRTWALPTYNNHLYKQISSASTGASNDNHYFGYSTPWGYFDFNRFHCHFSPRDWQRLINNNWGFRPKRLNFKLFNIQVKEVTTNDGVTTIANNLTSTVQVFSDSEYQLPYVLGSAHQGCLPPFPADVFMIPQYGYLTLNNGSQAVGRSSFYCLEYFPSQMLRTGNNFTFSYTFEEVPLHSSYAHSQSLDRLMNPLIDQYLYYLNRTQNQSGSAQNKDLLFSRGSPAGMSVQPKNWLPGPCYRQQRVSKTKTDNNNSNFTWTGASKYNLNGRESIINPGTAMASHKDDEDKFFPMSGVMIFGKESAGASNTALDNVMITDEEEIKATNPVATERFGTVAVNFQSSSTDPATGDVHAMGALPGMVWQDRDVYLQGPIWAKIPHTDGHFHPSPLMGGFGLKNPPPQILIKNTPVPANPPAEFSATKFASFITQYSTGQVSVEIEWELQKENSKRWNPEVQYTSNYAKSASVDFTVDNNGLYTEPRPIGTRYLTRPL

SEQ ID NO: 274 - DNA, 2214 bp, Artificial Sequence
  source: /note="Description of Artificial Sequence: Synthetic polynucleotide"
atggctgctgacggttatcttccagattggctcgaggacaacctctctgagggcattcgcgagtggtgggacctgaaacctggagcccccaagcccaaggccaaccagcagaagcaggacgacggccggggtctggtgcttcctggctacaagtacctcggacccttcaacggactcgacaagggggagcccgtcaacgcggcggacgcagcggccctcgagcacgacaaggcctacgaccagcagctcaaagcgggtgacaatccgtacccgcggtataaccacgccgacgccgagtttcaggagcgtctgcaagaagatacgccttttgggggcaacctcgggcgagcagtcttccaggccaagaagcgggttctcgaacctctcggtctggttgaggaagctgctaagacggctcctggaaagaagagaccggtagaaccgtcacctcagcgttcccccgactcctccacgggcatcggcaagaaaggccagcagcccgctaaaaagagactgaactttggtcagactggcgactcagagtcagtccccgaccctcaaccaatcggagaaccaccagcaggcccctctggtctgggatctggtacaatggctgcaggcggtggcgctccaatggcagacaataacgaaggcgccgacggagtgggtaatgcctcaggaaattggcattgcgattccacatggctgggcgacagagtcatcaccaccagcacccgcacctgggccttgcccacctacaataaccacctctacaagcaaatctccagtgcttcaacgggggccagcaacgacaaccactacttcggctacagcaccccctgggggtattttgatttcaacagattccactgccacttttcaccacgtgactggcagcgactcatcaacaacaattggggattccggcccaagagactcaacttcaaactcttcaacatccaagtcaaggaggtcacgacgaatgatggcgtcacaaccatcgctaataaccttaccagcacggttcaagtcttctcggactcggagtaccagcttccgtacgtcctcggctctgcgcaccagggctgcctccctccgttcccggcggacgtgttcatgattccgcaatacggctacctgacgctcaacaatggcagccaagccgtgggacgttcatccttttactgcctggaatatttcccttctcagatgctgagaacgggcaacaactttaccttcagctacacctttgaggaagtgcctctccacagcagctacgcgcacagccagagcctggaccggctgatgaatcctctcatcgtccaatacctgtattacctgaacagaactcaaaatcagtccggaagtgcccaaaacaaggacttgctgttcagccgtgggtctccagctggcatgtctgttcagcccaaaaactggctacctggaccctgttatcggcagcagcgcgtttctaaaacaaaaacagacaacaacaacagcaattttacctggactggtgcttcaaaatataacctcaatgggcgtgaatccatcatcaaccctggcactgctatggcctcacacaaagacgacgaagacaagttctttcccatgagcggtgtcatgatttttggaaaagagagcgccggagcttcaaacactgcattggacaatgtcatgattacagacgaagaggaaattaaagccactaaccctgtggccaccgaaagatttgggaccgtggcagtcaatttccagagcagcagcacagaccctgcgaccggagatgtgcatgctatgggagcattacctggcatggtgtggcaagatagagacgtgtacctgcagggtcccatttgggccaaaattcctcacacagatggacactttcacccgtctcctcttatgggcggctttggactcaagaacccgcctcctcagatcctcatcaaaaacacgcctgttcctgcgaatcctccggcggagttttcagctacaaagtttgcttcattcatcacccaatactccacaggacaagtgagtgtggaaattgaatgggagctgcagaaagaaaacagcaagcgctggaatcccgaagtgcagtacacatccaattatgcaaaatctgccagcgttgattttactgtggacaacaatggactttatactgagcctcgccccattggcacccgttaccttacccgtcccctgtaa

SEQ ID NO: 275 - protein, 736 aa, Artificial Sequence
  source: /note="Description of Artificial Sequence: Synthetic polypeptide"
MAADGYLPDWLEDTLSEGIRQWWKLRPGPPPPKPAERHKDDSRGLVLPGYKYLGPFNGLDKGEPVNEADAAALEHDKAYDRQLDSGDNPYLKYNHADAEFQERLKEDTSFGGNLGRAVFQAKKRVLEPLGLVEEGAETAPGKKRPVEQSPQGPDSSSGIGKTGQQPAKKRLNFGQTGDSESVPDPQPLGEPPATPAAVGPTTMASGGGAPMADNNEGADGVGNASGNWHCDSTWLGDRVITTSTRTWALPTYNNHLYKQISSASTGASNDNHYFGYSTPWGYFDFNRFHCHFSPRDWQRLINNNWGFRPKRLNFKLFNIQVKEVTTNDGVTTIANNLTSTVQVFSDSEYQLPYVLGSAHQGCLPPFPADVFMIPQYGYLTLNNGSQAVGRSSFYCLEYFPSQMLRTGNNFTFSYTFEEVPFHSSYAHSQSLDRLMNPLIDQYLYYPNRTQNQSGSAQNKDLLFSRGSPAGMSVQPKNWLPGPCYRQQRVSKTKTDNNNSNFTWTGASKYNLNGRESIINPGTAMASHKDDEDKFFPMSGVMIFGKESAGASNTALDNVMITDEEEIKATNPVATERFGTVAVNFQSSSTDPATGDVHAMGALPGMVWQGRDVYLQGPIWAKIPHTDGHFHPSPLMGGFGLKNPPPQILIKNTPVPANPPAEFSATKFASFITQYSTGQVSVEIEWELQKENSKRWNPEVQYTSNYAKSANVDFTVDNNGLYTEPRPIGTRYLTRPL

SEQ ID NO: 276 - DNA, 2211 bp, Artificial Sequence
  source: /note="Description of Artificial Sequence: Synthetic polynucleotide"
atggctgccgatggttatcttccagattggctcgaggacactctctctgaaggaataagacagtggtggaagctcagacctggcccaccaccaccaaagcccgcagagcggcataaggacgacagcaggggtcttgtgcttcctgggtacaagtacctcggacccttcaacggactcgacaagggagagccggtcaacgaggcagacgccgcggccctcgagcacgacaaagcctacgaccggcagctcgacagcggagacaacccgtacctcaagtacaaccacgccgacgcggagtttcaggagcgccttaaagaagatacgtcttttgggggcaacctcgggcgagcagtcttccaggccaagaagcgggttctcgaacctctcggtctggttgaggaaggcgctgagacggctcctggaaagaaacgtccggtagagcagtcgccacaagggccagactcctcctcgggcatcggcaagacaggccagcagcccgctaaaaagagactcaattttggtcagactggcgactcagagtcagtccccgatccacaacctctcggagaacctccagcaacccccgctgctgtgggacctactacaatggcttcaggcggtggcgcaccaatggcagacaataacgaaggcgccgacggagtgggtaatgcctcaggaaattggcattgcgattccacatggctgggcgacagagtcatcaccaccagcacccgcacctgggccttgcccacctacaataaccacctctacaagcaaatctccagtgcttcaacgggggccagcaacgacaaccactacttcggctacagcaccccctgggggtattttgatttcaacagattccactgccacttttcaccacgtgactggcagcgactcatcaacaacaattggggattccggcccaagagactcaacttcaaactcttcaacatccaagtcaaggaggtcacgacgaatgatggcgtcacaaccatcgctaataaccttaccagcacggttcaagtcttctcggactcggagtaccagcttccgtacgtcctcggctctgcgcaccagggctgcctccctccgttcccggcggacgtgttcatgattccgcaatacggctacctgacgctcaacaatggcagccaagccgtgggacgttcatccttttactgcctggaatatttcccttctcagatgctgagaacgggcaacaactttaccttcagctacacctttgaggaagtgcctttccacagcagctacgcgcacagccagagcctggaccggctgatgaatcctctcatcgaccaatacctgtattacccgaacagaactcaaaatcagtccggaagtgcccaaaacaaggacttgctgtttagccgtgggtctccagctggcatgtctgttcagcccaaaaactggctacctggaccctgttatcggcagcagcgcgtttctaaaacaaaaacagacaacaacaacagcaattttacctggactggtgcttcaaaatataacctcaatgggcgtgaatccatcatcaaccctggcactgctatggcctcacacaaagacgacgaagacaagttctttcccatgagcggtgtcatgatttttggaaaagagagcgccggagcttcaaacactgcattggacaatgtcatgattacagacgaagaggaaattaaagccactaaccctgtggccaccgaaagatttgggaccgtggcagtcaatttccagagcagcagcacagaccctgcgaccggagatgtgcatgctatgggagcattacctggcatggtgtggcaaggtagagacgtgtacctgcagggtcccatttgggccaaaattcctcacacagatggacactttcacccgtctcctcttatgggcggctttggactcaagaacccgcctcctcagatcctcatcaaaaacacgcctgttcctgcgaatcctccggcggagttttcagctacaaagtttgcttcattcatcacccaatactccacaggacaagtgagtgtggaaattgaatgggagctgcagaaagaaaacagcaagcgctggaatcccgaagtgcagtacacatccaattatgcaaaatctgccaacgttgattttactgtggacaacaatggactttatactgagcctcgccccattggcacccgttaccttacccgtcccctgtaa

SEQ ID NO: 277 - protein, 736 aa, Artificial Sequence
  source: /note="Description of Artificial Sequence: Synthetic polypeptide"
MAADGYLPDWLEDTLSEGIRQWWKLRPGPPPPKPAERHKDDSRGLVLPGYKYLGPFNGLDKGEPVNEADAAALEHDKAYDRQLDSGDNPYLKYNHADAEFQERLKEDTSFGGNLGRAVFQAKKRVLEPLGLVEEGAKTAPGKKRPVEQSPQGPDSSSGIGKTGQQPAKKRLNFGQTGDSESVPDPQPLGEPPATPAAVGPTTMASGGGAPMADNNEGADGVGNASGNWHCDSTWLGDRVITTSTRTWALPTYNNHLYKQISSASTGASNDNHYFGYSTPWGYFDFNRFHCHFSPRDWQRLINNNWGFRPKRLNFKLFNIQVKEVTTNDGVTTIANNLTSTVQVFSDSEYQLPYVLGSAHQGCLPPFPADVFMIPQYGYLTLNNGSQAVGRSSFYCLEYFPSQMLRTGNNFTFSYTFEEVPFHSSYAHSQSLDRLMNPLIDQYLYYPNRTQNQSGSAQNKDLLFSRGSPAGMSVQPKNWLPGPCYRQQRVSKTKTDNNNSNFTWTGASKYNLNGRESIINPGTAMASHKDDEDKFFPMSGVMIFGKESAGASNTALDNVMITDEEEIKATNPVATERFGTVAVNFQSSSTDPATGDVHAMGALPGMVWQGRDVYLQGPIWAKIPHTDGHFHPSPLMGGFGLKNPPPQILIKNTPVPANPPAEFSATKFASFITQYSTGQVSVEIEWELQKENSKRWNPEVQYTSNYAKSANVDFTVDNNGLYTEPRPIGTRYLTRPL

SEQ ID NO: 278 - protein, 736 aa, Artificial Sequence
  source: /note="Description of Artificial Sequence: Synthetic polypeptide"
MAADGYLPDWLEDTLSEGIRQWWKLRPGPPPPKPAERHKDDSRGLVLPGYKYLGPFNGLDKGEPVNEADAAALEHDKAYDRQLDSGDNPYLKYNHADAEFQERLKEDTSFGGNLGRAVFQAKKRVLEPLGLVEEGAKTAPGKKRPVEQSPQGPDSSSGIGKTGQQPAKKRLNFGQTGDSESVPDPQPLGEPPATPAAVGPTTMASGGGAPMADNNEGADGVGNASGNWHCDSTWLGDRVITTSTRTWALPTYNNHLYKQISSASTGASNDNHYFGYSTPWGYFDFNRFHCHFSPRDWQRLINNNWGFRPKRLNFKLFNIQVKEVTTNDGVTTIANNLTSTVQVFSDSEYQLPYVLGSAHQGCLPPFPADVFMIPQYGYLTLNNGSQAVGRSSFYCLEYFPSQMLRTGNNFTFSYTFEEVPFHSSYAHSQSLDRLMNPLIDQYLYYLNRTQNQSGSAQNKDLLFSRGSPAGMSVQPKNWLPGPCYRQQRVSKTKTDNNNSNFTWTGASKYNLNGRESIINPGTAMASHKDDEDKFFPMSGVMIFGKESAGASNTALDNVMITDEEEIKATNPVATERFGTVAVNFQSSSTDPATGDVHAMGALPGMVWQGRDVYLQGPIWAKIPHTDGHFHPSPLMGGFGLKNPPPQILIKNTPVPANPPAEFSATKFASFITQYSTGQVSVEIEWELQKENSKRWNPEVQYTSNYAKSANVDFTVDNNGLYTEPRPIGTRYLTRPL

SEQ ID NO: 279 - protein, 736 aa, Artificial Sequence
  source: /note="Description of Artificial Sequence: Synthetic polypeptide"
MAADGYLPDWLEDTLSEGIRQWWKLRPGPPPPKPAERHKDDSRGLVLPGYKYLGPFNGLDKGEPVNEADAAALEHDKAYDRQLDSGDNPYLKYNHADAEFQERLKEDTSFGGNLGRAVFQAKKRVLEPLGLVEEGAKTAPGKKRPVEQSPQGPDSSSGIGKTGQQPAKKRLNFGQTGDSESVPDPQPLGEPPATPAAVGPTTMASGGGAPMADNNEGADGVGNASGNWHCDSTWLGDRVITTSTRTWALPTYNNHLYKQISSASTGASNDNHYFGYSTPWGYFDFNRFHCHFSPRDWQRLINNNWGFRPKRLNFKLFNIQVKEVTTNDGVTTIANNLTSTVQVFSDSEYQLPYVLGSAHQGCLPPFPADVFMIPQYGYLTLNNGSQAVGRSSFYCLEYFPSQMLRTGNNFTFSYTFEEVPFHSSYAHSQSLDRLMNPLIDQYLYYLNRTQNQSGSAQNKDLLFSRGSPAGMSVQPKNWLPGPCYRQQRVSKTKTDNNNSNFTWTGASKYNLNGRESIINPGTAMASHKDDEDKFFPMSGVMIFGKESAGASNTALDNVMITDEEEIKATNPVATERFGTVAVNFQSSSTDPATGDVHAMGALPGMVWQDRDVYLQGPIWAKIPHTDGHFHPSPLMGGFGLKNPPPQILIKNTPVPANPPAEFSATKFASFITQYSTGQVSVEIEWELQKENSKRWNPEVQYTSNYAKSANVDFTVDNNGLYTEPRPIGTRYLTRPL

SEQ ID NO: 280 - DNA, 2208 bp, Artificial Sequence
  source: /note="Description of Artificial Sequence: Synthetic polynucleotide"
atggctgccgatggctatcttccagattggctcgaggacactctctctgaaggaataagacagtggtggaagctcaaacctggcccaccaccaccaaagcccgcagagcggcatagggacgacagcaggggtcttgtgcttcctgggtacaagtacctcggacccttcaacggactcgacaagggagagccggtcaacgaggcagacgccgcggccctcgagcacgacaaagcctacgaccggcagctcgacagcggagacaacccgtacctcaagtacaaccacgccgacgcggagtttcaggagcgccttaaagaagatacgtcttttgggggcaacctcggacgagcagtcttccaggcgaaaaagagggttcttgaacctctgggcctggttgaggaacctgttaagacggctccgggaaaaaagaggccggtagagcactctcctgtggagccagactcctcctcgggaaccggaaaggcgggccagcagcctgcaagaaaaagattgaattttggtcagactggagacgcagactcagtacctgacccccagcctctcggacagccaccagcagccccctctggtctgggaactaatacgatggctacaggcagtggcgcaccaatggcagacaataacgagggcgccgacggagtgggtaattcctcgggaaattggcattgcgattccacatggatgggcgacagagtcatcaccaccagcacccgaacctgggccctgcccacctacaacaaccacctctacaaacaaatttccagccaatcaggagcctcgaacgacaatcactactttggctacagcaccccttgggggtattttgacttcaacagattccactgccacttttcaccacgtgactggcaaagactcatcaacaacaactggggattccgacccaagagactcaacttcaagctctttaacattcaagtcaaagaggtcacgcagaatgacggtacgacgacgattgccaataaccttaccagcacggttcaggtgtttactgactcggggtaccagctcccgtacgtcctcggctcggcgcatcaaggatgcctcccgccgttcccagcagacgtcttcatggtgccacagtatggataccccaccctgaacaacgggagtcaggcagtaggacgctcttcattttactgcctggagtactttccttctcagatgctgcgtaccggaaacaactttaccttcagctacacttttgaggacgttcctttccacagcagctacgctcacagccagagtctggaccgtctcatgaatcctctcatcgaccagtacctgtattacttgagcacaacaaacactccaagtggaaccaccacgcagtcaaggcttcagttttctcaggccggagcgagtgacattcgggaccagtctaggaactggcttcctggaccctgttaccgccagcagcgagtatcaaagacatctgcggataacaacaacagtgaatactcgtggactggagctaccaagtaccacctcaatggcagagactctctggtgaatccgggcccggccgtggcaagccacaaggacgatgaagaaaagttttttcctcagagcggggttctcatctttgggaagcaaggctcagagaaaacaaatgtggacattgaaaaggtcatgattacagacgaagaggaaatcaggacaaccaatcccgtggctacggagcagtatggttctgtatctaccaacctccagagaggcaacagacaagcagctaccgcagatgtcaacacacaaggcgttcttccaggcatggtctggcaggacagagatgtgtaccttcaggggcccatctgggcaaagattccacacacggacggacattttcacccctctcccctcatgggtggattcggacttaaacaccctcctccacagattctcatcaagaacaccccggtacctgcgaatccttcgaccaccttcagtgcggcaaagtttgcttccttcatcacacagtactccacgggacaggtcagcgtggagatcgagtgggagctgcagaaggaaaacagcaaacgctggaatcccgaaattcagtacacttccaactacaacaagtctgttaatgtggactttactgtggacactaatggcgtgtattcagagcctcgccccattggcaccagatacctgactcgtaatctgtaa

SEQ ID NO: 281 - protein, 735 aa, Artificial Sequence
  source: /note="Description of Artificial Sequence: Synthetic polypeptide"
MAADGYLPDWLEDTLSEGIRQWWKLKPGPPPPKPAERHRDDSRGLVLPGYKYLGPFNGLDKGEPVNEADAAALEHDKAYDRQLDSGDNPYLKYNHADAEFQERLKEDTSFGGNLGRAVFQAKKRVLEPLGLVEEPVKTAPGKKRPVEHSPVEPDSSSGTGKAGQQPARKRLNFGQTGDADSVPDPQPLGQPPAAPSGLGTNTMATGSGAPMADNNEGADGVGNSSGNWHCDSTWMGDRVITTSTRTWALPTYNNHLYKQISSQSGASNDNHYFGYSTPWGYFDFNRFHCHFSPRDWQRLINNNWGFRPKRLNFKLFNIQVKEVTQNDGTTTIANNLTSTVQVFTDSGYQLPYVLGSAHQGCLPPFPADVFMVPQYGYPTLNNGSQAVGRSSFYCLEYFPSQMLRTGNNFTFSYTFEDVPFHSSYAHSQSLDRLMNPLIDQYLYYLSTTNTPSGTTTQSRLQFSQAGASDIRDQSRNWLPGPCYRQQRVSKTSADNNNSEYSWTGATKYHLNGRDSLVNPGPAVASHKDDEEKFFPQSGVLIFGKQGSEKTNVDIEKVMITDEEEIRTTNPVATEQYGSVSTNLQRGNRQAATADVNTQGVLPGMVWQDRDVYLQGPIWAKIPHTDGHFHPSPLMGGFGLKHPPPQILIKNTPVPANPSTTFSAAKFASFITQYSTGQVSVEIEWELQKENSKRWNPEIQYTSNYNKSVNVDFTVDTNGVYSEPRPIGTRYLTRNL

SEQ ID NO: 282 - DNA, 2211 bp, Artificial Sequence
  source: /note="Description of Artificial Sequence: Synthetic polynucleotide"
atggctgccgacggttatcttccagattggctcgaggacactctctctgaaggaataagacagtggtggaagctcaaacctggcccaccaccaccaaagcccgcagagcggcataaggacgacagcaggggtcttgtgcttcctgggtacaagtacctcggacccttcaacggactcgacaagggagagccggtcaacgaggcagacgccgcggccctcgagcacgacaaagcctacgaccggcagctcgacagcggagacaacccgtacctcaagtacaaccacgccgacgcggagtttcaggagcgccttaaagaagatacgtcttttgggggcaacctcgggcgggcagtcttccaggccaagaagcgggttctcgaacctctcggtctggttgaggaaggcgctaagacggctcctggaaagaaacgtccggtagagcagtcgccacaagagccagactccccctcgggcatcggcaagacaggccagcagcccgctaaaaagagactcaattttggtcagactggcgactcagagtcagtccccgatccacaacctctcggagaacctccagcaacccccgctgctgtgggacctactacaatggcttcaggcggtggcgcaccaatggcagacaataacgaaggcgccgacggagtgggtaatgcctcaggaaattggcactgcgattccacatggctgggcgacagagtcatcaccaccagcacccgcacctgggccttgcccacctacaataaccacctctacaagcaaatctccagtgcttcaacgggggccagcaacgacaaccactacttcggctacagcaccccctgggggtattttgatttcaacagattccactgccacttttcaccacgtgactggcagcgactcatcaacaacaattggggattccggcccaagagactcaacttcaaactcttcaacatccaagtcaaggaggtcacgacgaatgatggcgtcacaaccatcgctaataaccttaccagcacggttcaagtcttctcggactcggagtaccagcttccgtacgtcctcggctctgcgcaccagggccgcctccctccgttcccggcggacgtgttcatgattccgcaatacggctacctgacgctcaacaatggcagccaagccgtgggacgttcatcctcttactgcctggaatatttcccttctcagatgctgagaacgggcaacaactttaccttcagctacacctttgaggaagtgcctctccacagcagctgcgcgcacagccagagcctggaccggctgatgaatcctctcatcgaccaatacctgtattacctgaacagaactcaaaatcagtccggaagtgcccaaaacagggacttgctgttcagccgtgggtctccagctggcatgtctgttcagcccaaaaactggctacctggaccctgttatcggcagcagcgcgtttctaaaacaaaaacagacaacaacaacagcaattttacctggactggtgcttcaaaatataacctcaatgggcgtgaatccatcatcaaccctggcactgctatggcctcacacaaagacgacgaagacaagttctttcccatgagcggtgtcatgatttttggaaaagagagcgccggagcttcaaacactgcattggacaatgtcatgattacagacgaagaggaaattaaagccactaaccctgtggccaccgaaagatttgggaccgtggcagtcaatttccagagcagcagcacagaccctgcgaccggagatgtgcatgctatgggagcattacctggcatggtgtggcaagatagagacgtgtacctgcagggtcccatttgggccaaaattcctcacacagatggacactttcacccgtctcctcttatgggcggctttggactcaagaacccgcctcctcagatcctcatcaaaaacacgcctgttcctgcgaatcctccggcggagttttcagctacaaagtttgcttcattcatcacccaatactccgcaggacaagtgagtgtggaaattgaatgggagctgcagaaagaaaacagcaagcgctggaatcccgaagtgcagtacacatccaattatgcaaaatctgccaacgttgattttactgtggacaacaatggactttatactgagcctcgccccattggcacccgttaccttacccgtcccctgtaa

SEQ ID NO: 283 - protein, 736 aa, Artificial Sequence
  source: /note="Description of Artificial Sequence: Synthetic polypeptide"
MAADGYLPDWLEDTLSEGIRQWWKLKPGPPPPKPAERHKDDSRGLVLPGYKYLGPFNGLDKGEPVNEADAAALEHDKAYDRQLDSGDNPYLKYNHADAEFQERLKEDTSFGGNLGRAVFQAKKRVLEPLGLVEEGAKTAPGKKRPVEQSPQEPDSPSGIGKTGQQPAKKRLNFGQTGDSESVPDPQPLGEPPATPAAVGPTTMASGGGAPMADNNEGADGVGNASGNWHCDSTWLGDRVITTSTRTWALPTYNNHLYKQISSASTGASNDNHYFGYSTPWGYFDFNRFHCHFSPRDWQRLINNNWGFRPKRLNFKLFNIQVKEVTTNDGVTTIANNLTSTVQVFSDSEYQLPYVLGSAHQGRLPPFPADVFMIPQYGYLTLNNGSQAVGRSSSYCLEYFPSQMLRTGNNFTFSYTFEEVPLHSSCAHSQSLDRLMNPLIDQYLYYLNRTQNQSGSAQNRDLLFSRGSPAGMSVQPKNWLPGPCYRQQRVSKTKTDNNNSNFTWTGASKYNLNGRESIINPGTAMASHKDDEDKFFPMSGVMIFGKESAGASNTALDNVMITDEEEIKATNPVATERFGTVAVNFQSSSTDPATGDVHAMGALPGMVWQDRDVYLQGPIWAKIPHTDGHFHPSPLMGGFGLKNPPPQILIKNTPVPANPPAEFSATKFASFITQYSAGQVSVEIEWELQKENSKRWNPEVQYTSNYAKSANVDFTVDNNGLYTEPRPIGTRYLTRPL

SEQ ID NO: 284 - protein, 736 aa, Artificial Sequence
  source: /note="Description of Artificial Sequence: Synthetic polypeptide"
MAADGYLPDWLEDTLSEGIRQWWKLKPGPPPPKPAERHKDDSRGLVLPGYKYLGPFNGLDKGEPVNEADAAALEHDKAYDRQLDSGDNPYLKYNHADAEFQERLKEDTSFGGNLGRAVFQAKKRVLEPLGLVEEGAKTAPGKKRPVEQSPQEPDSSSGIGKTGQQPAKKRLNFGQTGDSESVPDPQPLGEPPATPAAVGPTTMASGGGAPMADNNEGADGVGNASGNWHCDSTWLGDRVITTSTRTWALPTYNNHLYKQISSASTGASNDNHYFGYSTPWGYFDFNRFHCHFSPRDWQRLINNNWGFRPKRLNFKLFNIQVKEVTTNDGVTTIANNLTSTVQVFSDSEYQLPYVLGSAHQGCLPPFPADVFMIPQYGYLTLNNGSQAVGRSSFYCLEYFPSQMLRTGNNFTFSYTFEEVPLHSSCAHSQSLDRLMNPLIDQYLYYLNRTQNQSGSAQNRDLLFSRGSPAGMSVQPKNWLPGPCYRQQRVSKTKTDNNNSNFTWTGASKYNLNGRESIINPGTAMASHKDDEDKFFPMSGVMIFGKESAGASNTALDNVMITDEEEIKATNPVATERFGTVAVNFQSSSTDPATGDVHAMGALPGMVWQDRDVYLQGPIWAKIPHTDGHFHPSPLMGGFGLKNPPPQILIKNTPVPANPPAEFSATKFASFITQYSTGQVSVEIEWELQKENSKRWNPEVQYTSNYAKSANVDFTVDNNGLYTEPRPIGTRYLTRPL

SEQ ID NO: 285 - DNA, 2208 bp, Artificial Sequence
  source: /note="Description of Artificial Sequence: Synthetic polynucleotide"
atggctgccgatggctatcttccagattggctcgaggacactctctctgaaggaataagacagtggtggaagctcaaacctggcccaccaccaccaaagcccgcagagcggcatagggacgacagcaggggtcttgtgcttcctgggtacaagtacctcggacccttcaacggactcgacaagggagagccggtcaacgaggcagacgccgcggccctcgagcacgacaaagcctacgaccggcagctcgacagcggagacaacccgtacctcaagtacaaccacgccgacgcggagtttcaggagcgccttaaagaagatacgtcttttgggggcaacctcggacgagcagtcttccaggcgaaaaagagggttcttgaacctctgggcctggttggggaacctgttaagacggctccgggaaaaaagaggccggtagagcactctcctgtggagccagactcctcctcgggaaccggaaaggcgggccagcagcctgcaagaaaaagattgaattttggtcagactggagacgcagactcagtacctgacccccagcctctcggacagccaccagcagccccctctggtctgggaactaatacgatggctacaggcagtggcgcaccaatggcagacaataacgagggcgccgacggagtgggtaattcctcgggaaattggcattgcgattccacatggatgggcgacagagtcatcaccaccagcacccgaacctgggccctgcccacctacaacaaccacctctacaaacaaatttccagccaatcaggagcctcgaacgacagtcactactttggctacagcaccccttgggggtattttgacttcaacagattccactgccacttttcaccacgtgactggcaaagactcatcaacaacaactggggattccgacccaagagactcaacttcaagctctttaacattcaagtcaaagaggtcacgcagaatgacggtacgacgacgattgccaataaccttaccagcacggttcaggtgtttactgactcggagtaccagctcccgtacgtcctcggctcggcgcatcaaggatgcctcccgccgttcccagcagacgtcttcatggtgccacagtatggatacctcaccctgaacaacgggagtcaggcagtaggacgctcttcattttactgcctggagtactttccttctcagatgctgcgtaccggaaacaactttaccttcagctacacttttgaggacgttcctttccacagcagctacgctcacagccagagtctggaccgtctcatgaatcctctcatcgaccagtacctgtattacttgagcacaacaaacactccaagtggaaccaccacgcagtcaaggctccagttttctcaggccggagcgagtgacattcgggaccagtctaggaactggcttcctggaccctgttaccgccagcagcgagtatcaaagacatctgcggataacaacaacagtgaatactcgtggactggagctaccaagtaccacctcaatggcagagactctctggtgaatccgggcccggccatggcaagccacaaggacaatgaagaaaagttttttcctcagagcggggttctcatctttgggaagcaaggctcagagaaaacaaatgtggacattgaaaaggtcatgattacagacgaagaggaaatcaggacaaccaatcccgtggctacggagcagtatggttctgtatctaccaacctccagagaggcaacagacaagcagctaccgcagatgtcaacacacaaggcgttcttccaggcatggtctggcaggacagagatgtgtaccttcaggggcccatctgggcaaagattccacacacggacggacattttcacccctctcccctcatgggtggattcggacttaaacaccctcctccacagattctcatcaagaacaccccggtacctgcgaatccttcgaccaccttcagtgcggcaaagtttgcttccttcatcacacagtactccacgggacaggtcagcgtggagatcgagtgggagctgcagaaggaaaacagcaaacgctggaatcccgaaattcagtacacttccaactacaacaagtctgttaatgtggactttactgtggacactaatggcgtgtattcagagcctcgccccattggcaccagatacctgactcgtaatctgtaa

SEQ ID NO: 286 - protein, 735 aa, Artificial Sequence
  source: /note="Description of Artificial Sequence: Synthetic polypeptide"
MAADGYLPDWLEDTLSEGIRQWWKLKPGPPPPKPAERHRDDSRGLVLPGYKYLGPFNGLDKGEPVNEADAAALEHDKAYDRQLDSGDNPYLKYNHADAEFQERLKEDTSFGGNLGRAVFQAKKRVLEPLGLVGEPVKTAPGKKRPVEHSPVEPDSSSGTGKAGQQPARKRLNFGQTGDADSVPDPQPLGQPPAAPSGLGTNTMATGSGAPMADNNEGADGVGNSSGNWHCDSTWMGDRVITTSTRTWALPTYNNHLYKQISSQSGASNDSHYFGYSTPWGYFDFNRFHCHFSPRDWQRLINNNWGFRPKRLNFKLFNIQVKEVTQNDGTTTIANNLTSTVQVFTDSEYQLPYVLGSAHQGCLPPFPADVFMVPQYGYLTLNNGSQAVGRSSFYCLEYFPSQMLRTGNNFTFSYTFEDVPFHSSYAHSQSLDRLMNPLIDQYLYYLSTTNTPSGTTTQSRLQFSQAGASDIRDQSRNWLPGPCYRQQRVSKTSADNNNSEYSWTGATKYHLNGRDSLVNPGPAMASHKDNEEKFFPQSGVLIFGKQGSEKTNVDIEKVMITDEEEIRTTNPVATEQYGSVSTNLQRGNRQAATADVNTQGVLPGMVWQDRDVYLQGPIWAKIPHTDGHFHPSPLMGGFGLKHPPPQILIKNTPVPANPSTTFSAAKFASFITQYSTGQVSVEIEWELQKENSKRWNPEIQYTSNYNKSVNVDFTVDTNGVYSEPRPIGTRYLTRNL

SEQ ID NO: 287 - protein, 737 aa, Artificial Sequence
  source: /note="Description of Artificial Sequence: Synthetic polypeptide"
RMAADGYLPDWLEDNLSEGIREWWDLKPGAPKPKANQQKQDDGRGLVLPGYKYLGPFNGLDKGEPVNAADAAALEHDKAYDQQLKAGDNPYLRYNHADAEFQERLQEDTSFGGNLGRAVFQAKKRVLEPLGLVEEGAKTAPGKKRPVEQSPQEPDSSSGIGKTGQQPAKKRLNFGQTGDSESVPDPQPLGEPPATPAAVGPTTMASGGGAPMADNNEGADGVGNASGNWHCDSTWLGDRVITTSTRTWALPTYNNHLYKQISSTSTGASNDNHYFGYGTPWGYFDFNRFHCHFSPRDWQRLINNNWGFRPKRLNFKLFNIQVEEVTTNDGVTTIANNLTSTVQVFSDSEYQLPYVLGSAHQGCLPPFPADVFMIPQYGYLTLNNGSQAVGRSSFYCLEYFPSQMLRTGNNFTFSYTFEEVPFHSSYAHSQSLDRLMNPLIDQYLYYLNRTQNQSGSAQNKDLLFSRGSPAGMSVQPKNWLPGPCYRQQRVSKTKTDNNNSNFTWTGASKYNLNGRESIINPGTAVASHKDDEDKFFPMSGVMIFGKESAGASSTALDNVMITDEEEIKATNPVATERFGTVAVNFQSSSTDPATGDVHAMGALPGMVWQDRDVYLQGPIWAKIPHTDGHFHPSPLMGGFGLKNPPPQILIKNTPVPANPPAEFSATKFASFITQYSTGQVSVEIEWELQKENSKRWNPEVQYTSNYAKSANVDFTVDNNGLYTEPRPIGTRYLTRPL

SEQ ID NO: 288 - protein, 736 aa, Artificial Sequence
  source: /note="Description of Artificial Sequence: Synthetic polypeptide"
MAADGYLPDWLEDNLSEGIREWWDLKPGAPKPKANQQKQDDGRGLVLPGYKYLGPFNGLDKGEPVNAADAAALEHDKAYDQQLKAGDNPYLRYNHADAEFQERLQEDTSFGGNLGRAVFQAKKRVLEPLGLVEEGAKTAPGKKRPVEQSPQEPDSSSGIGKTGQQPAKKRLNFGQTGDSESVPDPQPLGEPPATPAAVGPTTMASGGGAPMADNNEGADGVGNASGNWHCDSTWLGDRVITTSTRTWALPTYNNHLYKQISSTSTGASNDNHYFGYGTPWGYFDFNRFHCHFSPRDWQRLINNNWGFRPKRLNFKLFNIQVEEVTTNDGVTTIANNLTSTVQVFSDSEYQLPYVLGSAHQGCLPPFPADVFMIPQYGYLTLNNGSQAVGRSSFYCLEYFPSQMLRTGNNFTFSYTFEEVPFHSSYAHSQSLDRLMNPLIDQYLYYLNRTQNQSGSAQNKDLLFSRGSPAGMSVQPKNWLPGPCYRQQRVSKTKTDNNNSNFTWTGASKYNLNGRESIINPGTAVASHKDDEDKFFPMSGVMIFGKESAGASSTALDNVMITDEEEIKATNPVATERFGTVAVNFQSSSTDPATGDVHAMGALPGMVWQDRDVYLQGPIWAKIPHTDGHFHPSPLMGGFGLKNPPPQILIKNTPVPANPPAEFSATKFASFITQYSTGQVSVEIEWELQKENSKRWNPEVQYTSNYAKSANVDFTVDNNGLYTEPRPIGTRYLTRPL

SEQ ID NO: 289 - DNA, 2211 bp, Artificial Sequence
  source: /note="Description of Artificial Sequence: Synthetic polynucleotide"
atggctgccgatggttatcttccagattggctcgaggacaacctctctgagggcattcgcgagtggtgggacttgaaacctggagccccgaagcccaaagccaaccagcaaaagcaggacgacggccggggtctggtgcttcctggctacaagtacctcggacccttcaacggactcgacaagggggagcccgtcaacgcggcggacgcagcggccctcgagcacgacaaggcctacgaccagcagctcaaagcgggtgacaatccgtacctgcggtataaccacgccgacgccgagtttcaggagcgtctgcaagaagatacgtcttttgggggcaacctcgggcgagcagtcttccaggccaagaagcgggttctcgaacctctcggtctggttgaggaaggcgctaagacggctcctggaaagaaacgtccggtagagcagtcgccacaagagccagactcctcctcgggcatcggcaagacaggccagcagcccgctaaaaagagactcaattttggccagactggcgactcagagtcagtccccgatccacaacctctcggagaacctccagcaacccccgctgctgtgggacctactacaatggcttcaggcggtggcgcaccaatggcagacaataacgaaggcgccgacggagtgggtaatgcctcaggaaattggcattgcgattccacatggctgggcgacagagtcatcaccaccagcacccgcacctgggccttgcccacctacaataaccacctctacaagcaaatctccagtacttcaacgggggccagcaacgacaaccactacttcggctacggcaccccctgggggtattttgatttcaacagattccactgccacttttcaccacgtgactggcagcgactcatcaacaacaattggggattccggcccaagagactcaacttcaaactcttcaacatccaagtcgaggaggtcacgacgaatgatggcgtcacaaccatcgctaataaccttaccagcacggttcaagtcttctcggactcggagtaccagcttccgtacgtcctcggctctgcgcaccagggctgcctccctccgttcccggcggacgtgttcatgattccgcaatacggctacctgacgctcaacaatggcagccaagccgtgggacgttcatccttttactgcctggaatatttcccttctcagatgctgagaacgggcaacaactttaccttcagctacacctttgaggaagtgcctttccacagcagctacgcgcacagccagagcctggaccggctgatgaatcctctcatcgaccaatacctgtattacctgaacagaacacaaaatcagtccggaagtgcccaaaacaaggacttgctgtttagccgtgggtctccagctggcatgtctgttcagcccaaaaactggctacctggaccctgttatcggcagcagcgcgtttctaaaacaaaaacagacaacaacaacagcaattttacctggactggtgcttcaaaatataacctcaatgggcgtgaatccatcatcaaccctggcaccgctgtggcctcacacaaagacgacgaagacaagttctttcccatgagcggtgtcatgatttttggaaaagagagcgccggagcttcaagcactgcattggacaatgtcatgattacagacgaagaggaaattaaagccactaaccctgtggccaccgaaagatttgggaccgtggcagtcaatttccagagcagcagcacagaccctgcgaccggagatgtgcatgctatgggagcattacctggcatggtgtggcaagatagagacgtgtacctgcagggtcccatttgggccaaaattcctcacacagatggacactttcacccgtctcctcttatgggcggctttggactcaagaacccgcctcctcagatcctcatcaaaaacacgcctgttcctgcgaatcctccggcggagttttcagctacaaagtttgcttcattcatcacccaatactccacaggacaagtgagtgtggaaattgaatgggagctgcagaaagaaaacagcaagcgctggaatcccgaagtgcagtacacatccaattatgcaaaatctgccaacgttgattttactgtggacaacaatggactttatactgagcctcgccccattggcacccgttaccttacccgtcccctgtaa

SEQ ID NO: 290 - protein, 737 aa, Artificial Sequence
  source: /note="Description of Artificial Sequence: Synthetic polypeptide"
RMAADGYLPDWLEDNLSEGIREWWDLKPGAPKPKANQQKQDDGRGLVLPGYKYLGPFNGLDKGEPVNAADAAALEHDKAYDQQLKAGDNPYLRYNHADAEFQERLQEDTSFGGNLGRAVFQAKKRVLEPLGLVEEGAKTAPGKKRPVEQSPQEPDSSSGIGKTGQQPAKKRLNFGQTGDSESVPDPQPLGEPPATPAAVGPTTMASGGGAPMADNNEGADGVGNASGNWHCDSTWLGDRVITTSTRTWALPTYNNHLYKQISSTSTGASNDNHYFGYSTPWGYFDFNRFHCHFSPRDWQRLINNNWGFRPKRLNFKLFNIQVEEVTTNDGVTTIANNLTSTVQVFSDSEYQLPYVLGSAHQGCLPPFPADVFMIPQYGYLTLNNGSQAVGRSSFYCLEYFPSQMLRTGNNFTFSYTFEEVPFHSSYAHSQSLDRLMNPLIDQYLYYLNRTQNQSGSAQNKDLLFSRGSPAGMSVQPKNWLPGPCYRQQRVSKTKTDNNNSNFTWTGASKYNLNGRESIINPGTAVASHKDDEDKFFPMSGVMIFGKESAGASSTALDNVMITDEEEIKATNPVATERFGTVAVNFQSSSTDPATGDVHAMGALPGMVWQDRDVYLQGPIWAKIPHTDGHFHPSPLMGGFGLKNPPPQILIKNTPVPANPPAEFSATKFASFITQYSTGQVSVEIEWELQKENSKRWNPEVQYTSNYAKSANVDFTVDNNGLYTEPRPIGTRYLTRPL

SEQ ID NO: 291 - protein, 737 aa, Artificial Sequence
  source: /note="Description of Artificial Sequence: Synthetic polypeptide"
RMAADGYLPDWLEDNLSEGIREWWDLKPGAPKPKANQQKQDDGRGLVLPGYKYLGPFNGLDKGEPVNAADAAALEHDKAYDQQLKAGDNPYLRYNHADAEFQERLQEDTSFGGNLGRAVFQAKKRVLEPLGLVEEGAKTAPGKKRPVEQSPQEPDSSSGIGKTGQQPAKKRLNFGQTGDSESVPDPQPLGEPPATPAAVGPTTMASGGGAPMADNNEGADGVGNASGNWHCDSTWLGDRVITTSTRTWALPTYNNHLYKQISSTSTGASNDNHYFGYSTPWGYFDFNRFHCHFSPRDWQRLINNNWGFRPKRLNFKLFNIQVKEVTTNDGVTTIANNLTSTVQVFSDSEYQLPYVLGSAHQGCLPPFPADVFMIPQYGYLTLNNGSQAVGRSSFYCLEYFPSQMLRTGNNFTFSYTFEEVPFHSSYAHSQSLDRLMNPLIDQYLYYLNRTQNQSGSAQNKDLLFSRGSPAGMSVQPKNWLPGPCYRQQRVSKTKTDNNNSNFTWTGASKYNLNGRESIINPGTAVASHKDDEDKFFPMSGVMIFGKESAGASSTALDNVMITDEEEIKATNPVATERFGTVAVNFQSSSTDPATGDVHAMGALPGMVWQDRDVYLQGPIWAKIPHTDGHFHPSPLMGGFGLKNPPPQILIKNTPVPANPPAEFSATKFASFITQYSTGQVSVEIEWELQKENSKRWNPEVQYTSNYAKSANVDFTVDNNGLYTEPRPIGTRYLTRPL

SEQ ID NO: 292 - protein, 737 aa, Artificial Sequence
  source: /note="Description of Artificial Sequence: Synthetic polypeptide"
RMAADGYLPDWLEDNLSEGIREWWDLKPGAPKPKANQQKQDDGRGLVLPGYKYLGPFNGLDKGEPVNAADAAALEHDKAYDQQLKAGDNPYLRYNHADAEFQERLQEDTSFGGNLGRAVFQAKKRVLEPLGLVEEGAKTAPGKKRPVEQSPQEPDSSSGIGKTGQQPAKKRLNFGQTGDSESVPDPQPLGEPPATPAAVGPTTMASGGGAPMADNNEGADGVGNASGNWHCDSTWLGDRVITTSTRTWALPTYNNHLYKQISSTSTGASNDNHYFGYSTPWGYFDFNRFHCHFSPRDWQRLINNNWGFRPKRLNFKLFNIQVKEVTTNDGVTTIANNLTSTVQVFSDSEYQLPYVLGSAHQGCLPPFPADVFMIPQYGYLTLNNGSQAVGRSSFYCLEYFPSQMLRTGNNFTFSYTFEEVPFHSSYAHSQSLDRLMNPLIDQYLYYLNRTQNQSGSAQNKDLLFSRGSPAGMSVQPKNWLPGPCYRQQRVSKTKTDNNNSNFTWTGASKYNLNGRESIINPGTAVASHKDDEDKFFPMSGVMIFGKESAGANSTALDNVMITDEEEIKATNPVATERFGTVAVNFQSSSTDPATGDVHAMGALPGMVWQDRDVYLQGPIWAKIPHTDGHFHPSPLMGGFGLKNPPPQILIKNTPVPANPPAEFSATKFASFITQYSTGQVSVEIEWELQKENSKRWNPEVQYTSNYAKSANVDFTVDNNGLYTEPRPIGTRYLTRPL

SEQ ID NO: 293 - DNA, 2208 bp, Artificial Sequence
  source: /note="Description of Artificial Sequence: Synthetic polynucleotide"
atggctgccgatggttatcttccagattggctcaaggacactctctctgaaggaataagacagtggtggaagctcaaacctggcccaccaccaccaaagcccgcagagcggcataaggacgacagcgggggtcttgtgcttcctgggtacaagtacctcggacccttcaacggactcgacaagggagagccggtcaacgaggcagacgccgcggccctcgagtacgacaaggcctacgaccggcagctcgacagcggagacaacccgtacctcaagtacaaccacgccgacgcggagtttcaggagcgccttaaagaagatacgtcttttgggggcaacctcggacgagcagtcttccaggcgaaaaagagggttcttgaacctctgggcctggttgaggaacctgttaagacggctccgggaaaaaagaggccggtagagcactctcctgtggagccagactcctcctcgggaacaggaaaagcgggccagcagcctgcgagaaagagattgaattttggtcagactggagacgcagactccgtacctgacccccagcctctcggacagccaccagcagccccctctggtctgggaactaatacgatggctacaggcagtggcgcaccaatggcagacaataacgagggcgccgacggagtgggtaattcctcgggaagttggcattgcgattccacatggatgggcgacagagtcatcaccaccagcacccgaacctgggctctgcccacctacaacaaccatctgtacaagcagatctccagccaatcaggagccagcaacgacaaccactactttggctacagcaccccttgggggtattttgacttcaacagattccactgccacttttcaccacgtgactggcaaagactcatcaacaacaactggggattccggcccaagagactcaacttcaagctctttaacattcaagtcaaggaggtcacgcagaatgacggtacgacgacgattgccaataaccttaccagcacggttcaggtgtttactgactcggagtaccagctcccgtacgtccccggctcggcgcatcaaggatgcctcccgccgttcccagcagacgtcttcatggtgccacagtatggatacctcaccctgaacaacgggagtcaggcagtaggacgctcttcattttactgcctggagtactttccttctcagatgcttcgtaccggaaacaactttaccttcagctacacctttgaggatgttcctttccacagcagctacgctcacagccagagtttggaccgtctcatgaatcctctcatcgaccagtacctgtattacttgagcagaacaaacactccaagcggaaccaccacgcagtccaggcttcagttttctcaggccggagcaagtgacattcgggaccagtctaggaactggcttcctggaccctgttaccgccagcagcgagtatcaaagacagctgcggacaacaacaacagtgaatactcgtggactggagctaccaagtaccacctcaatggcagagactctctggtgaatccgggcccggccatggccagccacaaggacgatgaagaaaagttttttcctcaaagcggggttctcatctttgggaagcaaggctcagagaaaacaaatgtggacattgaaaaggtcatgattacagacgaagaggaaatcagaaccaccaatcccgtggccacggagcagtatggttctgtatctaccaacctccagagcggcaacacacaagcagctactgcagatgtcaacacacaaggcgttcttccaggcatggtctggcaggacagagacgtgcacctgcaggggcctatctgggcaaagattccacacacggacggacattttcacccctctcccctcatgggcggatttggacttaaacaccctcctccacagattctcatcaagaacaccccggtacctgcaaatccttcgaccaccttcagtgcggcaaagtttgcttccttcatcacacagtattccacagggcaggtcagcgtggagatcgagtgggagctgcagaaggagaacagcaaacgctggaaccccgagatccagtacacttccaactacaacaaatctgttaatgtggactttactgtggacactaatggtgtgtattcagagcctcgccccattggcaccagatacctgactcgtaatctgtaa

SEQ ID NO: 294 - protein, 735 aa, Artificial Sequence
  source: /note="Description of Artificial Sequence: Synthetic polypeptide"
MAADGYLPDWLKDTLSEGIRQWWKLKPGPPPPKPAERHKDDSGGLVLPGYKYLGPFNGLDKGEPVNEADAAALEYDKAYDRQLDSGDNPYLKYNHADAEFQERLKEDTSFGGNLGRAVFQAKKRVLEPLGLVEEPVKTAPGKKRPVEHSPVEPDSSSGTGKAGQQPARKRLNFGQTGDADSVPDPQPLGQPPAAPSGLGTNTMATGSGAPMADNNEGADGVGNSSGSWHCDSTWMGDRVITTSTRTWALPTYNNHLYKQISSQSGASNDNHYFGYSTPWGYFDFNRFHCHFSPRDWQRLINNNWGFRPKRLNFKLFNIQVKEVTQNDGTTTIANNLTSTVQVFTDSEYQLPYVPGSAHQGCLPPFPADVFMVPQYGYLTLNNGSQAVGRSSFYCLEYFPSQMLRTGNNFTFSYTFEDVPFHSSYAHSQSLDRLMNPLIDQYLYYLSRTNTPSGTTTQSRLQFSQAGASDIRDQSRNWLPGPCYRQQRVSKTAADNNNSEYSWTGATKYHLNGRDSLVNPGPAMASHKDDEEKFFPQSGVLIFGKQGSEKTNVDIEKVMITDEEEIRTTNPVATEQYGSVSTNLQSGNTQAATADVNTQGVLPGMVWQDRDVHLQGPIWAKIPHTDGHFHPSPLMGGFGLKHPPPQILIKNTPVPANPSTTFSAAKFASFITQYSTGQVSVEIEWELQKENSKRWNPEIQYTSNYNKSVNVDFTVDTNGVYSEPRPIGTRYLTRNL

SEQ ID NO: 295 - DNA, 2208 bp, Artificial Sequence
  source: /note="Description of Artificial Sequence: Synthetic polynucleotide"
atggctgccgatggttatcttccagattggctcgaggacactctctctgaaggaataagacagtggtggaagctcaaacctggcccaccaccaccaaagcccgcagagcggcataaggacgacagcaggggtcttgtgcttcctgggtacaagtacctcggacccttcaacggactcgacaagggggagccggtcaacgaggcagacgccgcggccctcgagcacgacaaggcctacgaccggcagctcgacagcggagacaacccgtacctcaagtacaaccacgccgacgcagagtttcaggagcgccttaaagaagatacgtcttttgggggcaacctcggacgagcagtcttccaggcgaaaaagagggttcttgaacctctgggcctggttgaggaacctgttaagacggctccgggaaaaaagaggccggtagagcactctcctgtggagccagactcctcctcgggaaccggaaaagcgggccagcagcctgcaagaaaaagattaaattttggtcagactggagacgcagactccgtacctgacccccagcctctcggacagccaccagcagccccctctggtctgggatctactacaatggctacaggcagtggcgcaccaatggcagacaataacgagggtgccgatggagtgggtaattcctcaggaaattggcattgcgattcccaatggctgggcgacagagtcatcaccaccagcacccgaacctgggccctgcccacatacaacaaccacctctacaagcaaatctccagccaatcaggagccagcaacgacaaccactactttggctacagcaccccctgggggtattttgacttcaacagattccactgccacttttcaccacgtgactggcaaagactcatcaacaacaactggggattccggcccaaaagactcaacttcaagctctttaatattcaagtcaaagaggtcacgcagaatgacggtacgacgacgattgccaataaccttaccagcacggttcaggtgtttactgactcggagtaccagctcccgtacgtcctgggctcggcgcatcaaggatgcctcccgccgtttccagcggacgtcttcatggtcccacagtatggatacctcaccctgaacaacgggagtcaggcggtaggacgctcttccttttactgcctggagtactttccttctcagatgctgcgtactggaaacaactttcagttcagctacacttttgaagacgtgcctttccacagcagctacgctcacagccagagtctggatcggctgatgaatcctctgatcgaccagtacctgtattatctgaacaagacacaaacaaatagtggaactcttcagcagtctcggctactgtttagccaagctggaccaaccaacatgtctcttcaagctaaaaactggctgcctggaccttgctacagacagcagcgtctgtcaaaacaggcaaacgacaacaacaacagcaactttccctggactgcagctacaaagtatcatctaaatggccgggactcgttggttaatccaggaccagctatggccagtcgcaaggatgacgaagaaaagtttttccccatgcatggaaccctgatatttggtaaacaaggaacaaatgccaacgacgcggatttggaaaatgtcatgattacagatgaagaagaaatcagggccaccaatcccgtggctacggagcagtacgggactgtgtcaaataatttgcaaaactcaaacactggtccaactactggaactgtcaatcaccaaggagcgttacctggtatggtgtggcaggatcgagacgtgtacctgcagggacccatttgggccaagattcctcacaccgatggacactttcatccttctccactgatgggaggttttggactcaaacacccgcctcctcagatcatgatcaaaaacactcccgttccagccaatcctcccacaaacttcagttctgccaagtttgcttctttcatcacacagtattccacgggacaggtcagcgtggagatcgagtgggagctgcagaaggagaacagcaaacgctggaatcccgaaattcagtacacttccaactacaacaagtctgttaatgtggactttactgtggacactaatggtgtgtattcagagcctcgccccattggcaccagatacctgactcgtaatctgtaa

SEQ ID NO: 296 - protein, 735 aa, Artificial Sequence
  source: /note="Description of Artificial Sequence: Synthetic polypeptide"
MAADGYLPDWLEDTLSEGIRQWWKLKPGPPPPKPAERHKDDSRGLVLPGYKYLGPFNGLDKGEPVNEADAAALEHDKAYDRQLDSGDNPYLKYNHADAEFQERLKEDTSFGGNLGRAVFQAKKRVLEPLGLVEEPVKTAPGKKRPVEHSPVEPDSSSGTGKAGQQPARKRLNFGQTGDADSVPDPQPLGQPPAAPSGLGSTTMATGSGAPMADNNEGADGVGNSSGNWHCDSQWLGDRVITTSTRTWALPTYNNHLYKQISSQSGASNDNHYFGYSTPWGYFDFNRFHCHFSPRDWQRLINNNWGFRPKRLNFKLFNIQVKEVTQNDGTTTIANNLTSTVQVFTDSEYQLPYVLGSAHQGCLPPFPADVFMVPQYGYLTLNNGSQAVGRSSFYCLEYFPSQMLRTGNNFQFSYTFEDVPFHSSYAHSQSLDRLMNPLIDQYLYYLNKTQTNSGTLQQSRLLFSQAGPTNMSLQAKNWLPGPCYRQQRLSKQANDNNNSNFPWTAATKYHLNGRDSLVNPGPAMASRKDDEEKFFPMHGTLIFGKQGTNANDADLENVMITDEEEIRATNPVATEQYGTVSNNLQNSNTGPTTGTVNHQGALPGMVWQDRDVYLQGPIWAKIPHTDGHFHPSPLMGGFGLKHPPPQIMIKNTPVPANPPTNFSSAKFASFITQYSTGQVSVEIEWELQKENSKRWNPEIQYTSNYNKSVNVDFTVDTNGVYSEPRPIGTRYLTRNL

SEQ ID NO: 297 - DNA, 2208 bp, Artificial Sequence
  source: /note="Description of Artificial Sequence: Synthetic polynucleotide"
atggctgccgatggttatcttccagattggctcgaggacactctctctgaaggaataagacagtggtggaagctcaaacctggcccaccaccaccaaagcccgcagagcggcataaggacgacagcaggggtcttgtgcttcctgggtacaagtacctcggacccttcaacggactcgacaagggagagccggtcaacgaggcagacgccgcggccctcgagcacgacaaagcctacgaccggcagctcgacagcggagacaacccgtacctcaagtacaaccacgccgacgcggagtttcaggagcgccttaaagaagatacgtcttttgggggcaacctcggacgagcagtcttccaggcgaaaaagagggttcttgaacctctgggcctggttggggaacctgtcaagacggctccaggaaaaaagaggccggtagagcactctcctgtggagccagactcctcctcgggaaccggaaaggcgggccagcagcctgcaagaaaaagattgaattttggtcagactggagacgcagactcagtacctgacccccagcctctcggacagccaccagcagccccctctggtctgggaactaatacgatggctacaggcagtggcgcaccaatggcagacaataacgagggcgccgacggagtgggtaattcctcgggaaattggcattgcgattccacatggatgggcgacagagtcatcaccaccagcacccgaacctgggccctgcccacctacaacaaccacctctacaaacaaatttccagccaatcaggagcctcgaacgacaatcactactttggctacagcaccccttgggggtattttgacttcaacagattccactgccacttttcaccacgtgactggcaaagactcatcaacaacaactggggattccgacccaagagactcaacttcaagctctttaacattcaagtcaaagaggtcacgcagaatgacggtacgacgacgattgccaataaccttaccagcacggttcaggtgtttactgactcggagtaccagctcccgtacgtcctcggctcggcgcatcaaggatgcctcccgccgttcccagcagacgtcttcatggtgccacagtatggatacctcaccctgaacaacgggagtcaggcagtaggacgctcttcattttactgcctggagtactttccttctcagatgctgcgtaccggaaacaactttaccttcagctacacttttgaggacgttcctttccacagcggctacgctcacagccagagtctggaccgtctcatgaatcctctcatcgaccagtacctgtattacttgagcacaacaaacactccaagtggaaccaccacgcagtcaaggcttcagttttctcaggccggagcgagtgacattcgggaccagtctaggaactggcttcctggaccctgttaccgccagcagcgagtatcaaagacatctgcggataacaacaacagtgaatactcgtggactggagctaccaagtaccacctcaatggcagagactctctggtgaatccgggcccggccatggcaagccacaaggacaatgaagaaaagttttttcctcagagcggggttctcatctttgggaagcaaggctcagagaaaacaaatgtggacattgaaaaggtcatgattacagacgaagaggaaatcaggacaaccaatcccgtggctacggagcagtacggttctgtatctaccaacctccagagaggcaacagacaagcagctaccgcagatgtcaacacacaaggcgttcttccaggcatggtctggcaggacagagatgtgtaccttcaggggcccatctgggcaaagattccacacacggacggacattttcacccctctcccctcatgggtggattcggacttaaacaccctcctccacagattctcatcaagaacaccccggtacctgcgaatccttcgaccaccttcagtgcggcaaagtttgcttccttcatcacacagtactccacgggacaggtcagcgtggagatcgagtgggagctgcagaaggaaaacagcaaacgctggaatcccgaaattcagtacacttccaactacaacaagtctgttaatgtggactttactgtggacactaatggcgtgtattcagagcctcgccccattggcaccagatacctgactcgtaatctgtaa

SEQ ID NO: 298 - protein, 735 aa, Artificial Sequence
  source: /note="Description of Artificial Sequence: Synthetic polypeptide"
MAADGYLPDWLEDTLSEGIRQWWKLKPGPPPPKPAERHKDDSRGLVLPGYKYLGPFNGLDKGEPVNEADAAALEHDKAYDRQLDSGDNPYLKYNHADAEFQERLKEDTSFGGNLGRAVFQAKKRVLEPLGLVGEPVKTAPGKKRPVEHSPVEPDSSSGTGKAGQQPARKRLNFGQTGDADSVPDPQPLGQPPAAPSGLGTNTMATGSGAPMADNNEGADGVGNSSGNWHCDSTWMGDRVITTSTRTWALPTYNNHLYKQISSQSGASNDNHYFGYSTPWGYFDFNRFHCHFSPRDWQRLINNNWGFRPKRLNFKLFNIQVKEVTQNDGTTTIANNLTSTVQVFTDSEYQLPYVLGSAHQGCLPPFPADVFMVPQYGYLTLNNGSQAVGRSSFYCLEYFPSQMLRTGNNFTFSYTFEDVPFHSGYAHSQSLDRLMNPLIDQYLYYLSTTNTPSGTTTQSRLQFSQAGASDIRDQSRNWLPGPCYRQQRVSKTSADNNNSEYSWTGATKYHLNGRDSLVNPGPAMASHKDNEEKFFPQSGVLIFGKQGSEKTNVDIEKVMITDEEEIRTTNPVATEQYGSVSTNLQRGNRQAATADVNTQGVLPGMVWQDRDVYLQGPIWAKIPHTDGHFHPSPLMGGFGLKHPPPQILIKNTPVPANPSTTFSAAKFASFITQYSTGQVSVEIEWELQKENSKRWNPEIQYTSNYNKSVNVDFTVDTNGVYSEPRPIGTRYLTRNL

SEQ ID NO: 299 - DNA, 2208 bp, Artificial Sequence
  source: /note="Description of Artificial Sequence: Synthetic polynucleotide"
atggctgccgatggttatcttccagattggctcgaggacactctctctgaaggaataagacagtggtggaagctcaaacctggcccaccaccaccaaagcccgcagagcggcataaggacgacagcaggggtcttgtgcttcctgggtacaagtacctcggacccttcaacggactcgacaagggagagccggtcaacgaggcagacgccgcggccctcgagcacgacaaagcctacgaccggcagctcgacagcggagacaacccgtacctcaagtacaaccacgccgacgcggagtttcaggagcgccttaaagaagatacgtcttttgggggcaacctcggacgagcagtcttccaggcgaaaaagagggttcttgaacctctgggcctggttggggaacctgttaagacggctccgggaaaaaagaggccggtagagcactctcctgtggagccagactcctcctcgggaaccggaaaggcgggccagcagcctgcaagaaaaagattgaattttggtcagactggagacgcagactcagtacctgacccccagcctctcggacagccaccagcagccccctctggtctgggaactaatacgatggctacaggcagtggcgcaccaatggcagacaataacgagggcgccgacggagtgggtaattcctcgggaaatcggcattgcgattccacatggatgggcgacagagtcatcaccaccagcacccgaacctgggccctgcccacctacaacaaccacctctacagacaaatttccagccaatcaggagcctcgaacgacaatcactactttggctacagcaccccttgggggtattttgacttcaacagattccactgccacttttcaccacgtgactggcaaagactcatcaacaacaactggggattccgacccaagagactcaacttcaagctctttaacattcaagtcaaagaggtcacgcagaatgacggtacgacgacgattgccaataaccttaccagcacggttcaggtgtttactgactcggagtaccagctcccgtacgtcctcggctcggcgcatcaaggatgcctcccgccgttcccagcagacgtcttcatggtgccacagtatggatacctcaccctgagcaacgggagtcaggcagtaggacgctcttcattttactgcccggagtactttccttctcagatgctgcgtaccggaaacaactttaccttcagctacacttttgaggacgttcctttccacagcagctacgctcacagccagagtctggaccgtctcatgaatcctctcatcgaccagtacctgtattacttgagcacaacaaacactccaagtggaaccaccacgcagtcaaggcttcagttttctcaggccggagcgagtgacattcgggaccagtctaggaactggcttcctggaccctgttaccgccagcagcgagtatcaaagacatctgcggataacaacaacagtgaatactcgtggactggagctaccaagtaccacctcaatggcagagactctctggtgaatccgggcccggccatggcaagccacaaggacaatgaagaaaagttttttcctcagagcggggttctcatctttgggaagcaaggctcagagaaaacaaatgtggacattgaaaaggtcatgattacagacgaagaggaaatcaggacaaccaatcccgtggctacggagcagtatggttctgtatctaccaacctccagagaggcaacagacaagcagctaccgcagatgtcaacacacaaggcgttcttccaggcatggtctggcaggacagagatgtgtaccttcaggggcccatctgggcaaagattccacacacggacggacattttcacccctctcccctcatgggtggattcggacctaaacaccctcctccacagattctcatcaagaacaccccggtacctgcgaatccttcgaccaccttcagtgcggcaaagtttgcttccttcatcacacagtactccacgggacaggtcagcgtggagatcgagtgggagctgcagaaggaaaacagcaaacgctggaatcccgaaattcagtacacttccaactacaacaagtctgttaatgtggactttactgtggacactaatggcgtgtattcagagcctcgccccattggcaccagatacctgactcgtaatttgtaa

SEQ ID NO: 300 - protein, 735 aa, Artificial Sequence
  source: /note="Description of Artificial Sequence: Synthetic polypeptide"
MAADGYLPDWLEDTLSEGIRQWWKLKPGPPPPKPAERHKDDSRGLVLPGYKYLGPFNGLDKGEPVNEADAAALEHDKAYDRQLDSGDNPYLKYNHADAEFQERLKEDTSFGGNLGRAVFQAKKRVLEPLGLVGEPVKTAPGKKRPVEHSPVEPDSSSGTGKAGQQPARKRLNFGQTGDADSVPDPQPLGQPPAAPSGLGTNTMATGSGAPMADNNEGADGVGNSSGNRHCDSTWMGDRVITTSTRTWALPTYNNHLYRQISSQSGASNDNHYFGYSTPWGYFDFNRFHCHFSPRDWQRLINNNWGFRPKRLNFKLFNIQVKEVTQNDGTTTIANNLTSTVQVFTDSEYQLPYVLGSAHQGCLPPFPADVFMVPQYGYLTLSNGSQAVGRSSFYCPEYFPSQMLRTGNNFTFSYTFEDVPFHSSYAHSQSLDRLMNPLIDQYLYYLSTTNTPSGTTTQSRLQFSQAGASDIRDQSRNWLPGPCYRQQRVSKTSADNNNSEYSWTGATKYHLNGRDSLVNPGPAMASHKDNEEKFFPQSGVLIFGKQGSEKTNVDIEKVMITDEEEIRTTNPVATEQYGSVSTNLQRGNRQAATADVNTQGVLPGMVWQDRDVYLQGPIWAKIPHTDGHFHPSPLMGGFGPKHPPPQILIKNTPVPANPSTTFSAAKFASFITQYSTGQVSVEIEWELQKENSKRWNPEIQYTSNYNKSVNVDFTVDTNGVYSEPRPIGTRYLTRNL

SEQ ID NO: 301 - DNA, 2205 bp, Artificial Sequence
  source: /note="Description of Artificial Sequence: Synthetic polynucleotide"
atggctgccgatggttatcttccagattggctcgaggacactctctctgaaggaataagacagtggtggaagctcaaacctggcccaccaccaccaaagcccgcagagcggcataaggacgacagcaggggtcttgtgcttcctgggtacaagtacctcggacccttcaacggactcgacaagggagagccggtcaacgaggcagacgccgcggccctcgagcacgacaaggcctacgaccggcagctcgacagcggagacaacccgtacctcaagtacaaccacgccgacgcggagtttcaggagcgtcttaaagaagatacgtcttttgggggcaacctcggacgagcagtcttccaggcgaaaaagagggttcttgaacctctgggcctggttgaggaacctgttaagacggctccgggaaaaaagaggccggtagagcactctcctgcggagccagactcctcctcgggaaccggaaaagcgggccagcagcctgcaagaaaaagactgaatttcggtcagactggagacgcagactccgtacctgacccccagcctctcagacagccaccagcagcccccacaagtttgggatctactacaatggctacaggcagtggcgcaccaatggcagacaataacgagggtgccgatggagtgggtaattcctcaggaaattggcattgcgattcccaatggctgggcgacagagtcatcaccaccagcacccgaacctgggccctgcccacctacaacaaccacctttacaagcaaatctccagccaatcaggagcctcaaacgacaaccactactttggctacagcaccccctgggggtattttgacttcaacagattccactgccacttttcaccacgtgactggcaaagactcatcaacaacaactggggattccgacccaagagactcaacttcaagctctttaacattcaagtcaaagaggtcacgcagaatgacggtacgacgacgattgccaataaccttaccagcacggttcaggtgtttactgactcggagtaccagctcccgtacgtcctcggctcggcgcatcaaggatgcctcccgccgtttccagcggacgtcttcatggtcccacagtatggatacctcaccctgaacaacgggagtcaggcggtaggacgctcttccttttactgcctggagtactttccttctcagatgctgcgtactggaaacaactttcagttcagctacacttttgaagacgtgcctttccacagcagctacgctcacagccagagtttggatcggctgatgaatcctctgatcgaccagtacctgtattatctaaacagaacacaaacagctagtggaactcagcagtctcggctactgtttagccaagctggacccacaagcatgtctcttcaagctaaaaactggctgcctggaccgtgttatcgccagcagcgtttgtcaaagcaggcaaacgacaacaacaacagcaactttccctggactggagctaccaagtactacctcaatggcagagactctttggtgaacccgggcccggccatggccagccacaaggacgatgaagaaaagtttttccccatgcatggaaccctaatatttggtaaagaaggaacaaatgctaccaacgcggaattggaaaatgtcatgattacagatgaagaggaaatcaggaccaccaatcccgtggctacagagcagtacggatatgtgtcaaataatttgcaaaactcaaatactgctgcaagtactgaaactgtgaatcaccaaggagcattacctggtatggtgtggcaggatcgagacgtgtacctgcagggacccatttgggccaagattcctcacaccgatggacactttcatccttctccactgatgggaggttttggactcaaacacccgcctcctcagattatgatcaaaaacactcccgttccagccaatcctcccacaaacttcagttctgccaagtttgcttccttcatcacacagtattccacgggacaggtcagcgtggagatcgagtgggagctgcagaaggagaacagcaaacgctggaatcccgaaattcagtacacttccaactacaacaaatctgttaatgtggactttactgtggacactaatggtgtgtattcagagcctcgccccattggcaccagatacctgactcgtaatctgtaa

SEQ ID NO: 302 - protein, 734 aa, Artificial Sequence
  source: /note="Description of Artificial Sequence: Synthetic polypeptide"
MAADGYLPDWLEDTLSEGIRQWWKLKPGPPPPKPAERHKDDSRGLVLPGYKYLGPFNGLDKGEPVNEADAAALEHDKAYDRQLDSGDNPYLKYNHADAEFQERLKEDTSFGGNLGRAVFQAKKRVLEPLGLVEEPVKTAPGKKRPVEHSPAEPDSSSGTGKAGQQPARKRLNFGQTGDADSVPDPQPLRQPPAAPTSLGSTTMATGSGAPMADNNEGADGVGNSSGNWHCDSQWLGDRVITTSTRTWALPTYNNHLYKQISSQSGASNDNHYFGYSTPWGYFDFNRFHCHFSPRDWQRLINNNWGFRPKRLNFKLFNIQVKEVTQNDGTTTIANNLTSTVQVFTDSEYQLPYVLGSAHQGCLPPFPADVFMVPQYGYLTLNNGSQAVGRSSFYCLEYFPSQMLRTGNNFQFSYTFEDVPFHSSYAHSQSLDRLMNPLIDQYLYYLNRTQTASGTQQSRLLFSQAGPTSMSLQAKNWLPGPCYRQQRLSKQANDNNNSNFPWTGATKYYLNGRDSLVNPGPAMASHKDDEEKFFPMHGTLIFGKEGTNATNAELENVMITDEEEIRTTNPVATEQYGYVSNNLQNSNTAASTETVNHQGALPGMVWQDRDVYLQGPIWAKIPHTDGHFHPSPLMGGFGLKHPPPQIMIKNTPVPANPPTNFSSAKFASFITQYSTGQVSVEIEWELQKENSKRWNPEIQYTSNYNKSVNVDFTVDTNGVYSEPRPIGTRYLTRNL

SEQ ID NO: 303 - DNA, 3160 bp, Artificial Sequence
  source: /note="Description of Artificial Sequence: Synthetic polynucleotide"
acccttcactaaagggactagtcctgcaggtttaaacgaattcgcccttgctgcgtcaactggaccaatgagaactttcccttcaacgactgtgtcgacaagatggtgatttggtgggaggaggggaagatgaccgccaaggtcgtggagtcggccaaagccattctcggaggaagcaaggtgcgcgtggaccagaaatgcaagtcctcggcccagatagatccgactcccgtgatcgtcacctccaacaccaacatgtgcgccgtgattgacgggaactcaacgaccttcgaacaccagcagccgttgcaagaccggatgttcaaatttgaactcacccgccgtctggatcatgactttgggaaggtcaccaagcgggaagtcaaagactttttccggtgggcaaaggatcacgtggttgaggtggagcatgaattctacgtcaaaaagggtggagccaagaaaagacccgcccctagtgacgcagatataagtgagcccaaacgggtgcgcgagtcagttgcgcagccatcgacgtcagacgcggaagcttcgatcaactacgcggacaggtaccaaaacaaatgttctcgtcacgtgggcatgaatctgatgctgtttccctgcagacaatgcgagagaatgaatcaaaattcaaatatctgcttcactcacggacagaaagactgtttagagtgctttcccgtgtcagaatctcaacctgtttctgtcgtcaaaaaggcgtatcagaaactgtgctacattcatcatatcatgggaaaggtgccagacgcttgcactgcctgcgatctggtcaatgtggatttggatgactgcatctctgaacaataaatgatttaaatcaggtatggctgccgatggttatcttccagattggctcgaggacactctctctgaaggaataagacagtggtggaagctcaaacctggcccaccaccaccaaagcccgcagagcggcataaggacgacagcaggggtcttgtgcttcctgggtacaagtacctcggacccttcaacggactcgacaagggagagccggtcaacgaggcagacgccgcggccctcgagcacgacaaggcctacgaccggcagctcgacagcggagacaacccgtacctcaagtacaaccacgccgacgcggagtttcaggagcgtcttaaagaagatacgtcttttgggggcaacctcggacgagcagtcttccaggcgaaaaagagggttcttgaacctctgggcctggttgaggaacctgttaagacggctccgggaaaaaagaggccggtagagcactctcctgcggagccagactcctcctcgggaaccggaaaagcgggccagcagcctgcaagaaaaagactgaatttcggtcagactggagacgcagactccgtacctgacccccagcctctcagacagccaccagcagcccccacaagtttgggatctactacaatggctacaggcagtggcgcaccaatggcagacaataacgagggtgccgatggagtgggtaattcctcaggaaattggcattgcgattcccaatggctgggcgacagagtcatcaccaccagcacccgaacctgggccctgcccacctacaacaaccacctttacaagcaaatctccagccaatcaggagcctcaaacgacaaccactactttggctacagcaccccctgggggtattttgacttcaacagattccactgccacttttcaccacgtgactggcaaagactcatcaacaacaactggggattccgacccaagagactcaacttcaagctctttaacattcaagtcaaagaggtcacgcagaatgacggtacgacgacgattgccaataaccttaccagcacggttcaggtgtttactgactcggagtaccagctcccgtacgtcctcggctcggcgcatcaaggatgcctcccgccgtttccagcggacgtcttcatggtcccacagtatggatacctcaccctgaacaacgggagtcaggcggtaggacgctcttccttttactgcctggagtactttccttctcagatgctgcgtactggaaacaactttcagttcagctacacttttgaagacgtgcctttccacagcagctacgctcacagccagagtttggatcggctgatgaatcctctgatcgaccagtacctgtattatctaaacagaacacaaacagctagtggaactcagcagtctcggctactgtttagccaagctggacccacaagcatgtctcttcaagctaaaaactggctgcctggaccgtgttatcgccagcagcgtttgtcaaagcaggcaaacgacaacaacaacagcaactttccctggactggagctaccaagtactacctcaatggcagagactctttggtgaacccgggcccggccatggccagccacaaggacgatgaagaaaagtttttccccatgcatggaaccctaatatttggtaaagaaggaacaaatgctaccaacgcggaattggaaaatgtcatgattacagatgaagaggaaatcaggaccaccaatcccgtggctacagagcagtacggatatgtgtcaaataatttgcaaaactcaaatactgctgcaagtactgaaactgtgaatcaccaaggagcattacctggtatggtgtggcaggatcgagacgtgtacctgcagggacccatttgggccaagattcctcacaccgatggacactttcatccttctccactgatgggaggttttggactcaaacacccgcctcctcagattatgatcaaaaacactcccgttccagccaatcctcccacaaacttcagttctgccaagtttgcttccttcatcacacagtattccacgggacaggtcagcgtggagatcgagtgggagctgcagaaggagaacagcaaacgctggaatcccgaaattcagtacacttccaactacaacaaatctgttaatgtggactttactgtggacactaatggtgtgtattcagagcctcgccccattggcaccagatacctgactcgtaatctgtaattgcttgttaatcaataaaccgtttaattcgtttcagttgaactttggtctctgcgaagggcgaattcgcggccgctaaatcaatcg

SEQ ID NO: 304 - protein, 734 aa, Artificial Sequence
  source: /note="Description of Artificial Sequence: Synthetic polypeptide"
MAADGYLPDWLEDTLSEGIRQWWKLKPGPPPPKPAERHKDDSRGLVLPGYKYLGPFNGLDKGEPVNEADAAALEHDKAYDRQLDSGDNPYLKYNHADAEFQERLKEDTSFGGNLGRAVFQAKKRVLEPLGLVEEPVKTAPGKKRPVEHSPAEPDSSSGTGKAGQQPARKRLNFGQTGDADSVPDPQPLGQPPAAPTSLGSTTMATGSGAPMADNNEGADGVGNSSGNWHCDSQWLGDRVITTSTRTWALPTYNNHLYKQISSQSGASNDNHYFGYSTPWGYFDFNRFHCRFSPRDWQRLINNNWGFRPKRLNFKLFNIQVKEVTQNDGTTTIANNLTSTVQVFTDSEYQLPYVLGSAHQGCLPPFPADVFMVPQYGYLTLNNGSQAVGRSSFYCLEYFPSQMLRTGNNFQFSYTFEDVPFHSSYAHSQGLDRLMNPLIDQYLYYLNRTQTASGTQQSRLLFSQAGPTSMSLQAKNWLPGPCYRQQRLSKQANDNNNSNFPWTGATKYHLNGGDSLVNPGPAMASHKDDEEKFFPMHGTLIFGKEGTNATNAELENVMITDEEEIRTTNPVATEQYGYVSNNLQNSNTAASTETVNHQGALPGMVWQDRDVYLRGPIWAKIPHADGHFHPSPLMGGFGLKHPPPQIMIKNTPVPANPPTNFSSAKFASFITQYSTGQVSVEIEWELQKENSKRWNPEIQYTSNYNKSVNVDFTVDTNGVYSEPRPIGTRYLTRNL

SEQ ID NO: 305 - DNA, 3157 bp, Artificial Sequence
  source: /note="Description of Artificial Sequence: Synthetic polynucleotide"
ctcactaagggactagtcctgcaggtttaaacgaattcgcccttgctgcgtcaactggaccaatgagaactttcccttcaacgactgtgtcgacaagatggtgatttggtgggaggaggggaagatgaccgccaaggtcgtggagtcggccaaagccactctcggaggaagcaaggtgcgcgtggaccagaaacgcaagtcctcggcccagatagatccgactcccgtgatcgtcacctccaacaccaacatgtgcgccgtgattgacgggaactcaacgaccttcgaacaccagcagccgttgcaagaccgaatgttcaaatttgaactcacccgccgtctggatcatgacttcgggaaggtcaccaagcaggaagtcaaagactttttccggtgggcaaaggatcacgtggttgaggtggagcatgaattctacgtcaaaaagggtggagccaagaaaagacccgcccctagtgacgcagatataagtgagcccaaacgggtgcgcgagtcagttgcgcagccatcgacgtcagacgcggaagcttcgatcaactacgcggacaggtaccaaaacaaatgttctcgtcacgtgggcatgaatctgatgctgtttccctgcagacaatgcgagagaatgaatcaaaattcaaatatctgcttcactcacggacagaaagactgtttagagtgctttcccgtgtcagaatctcaacctgtttctgtcgtcaaaaaggcgtatcagaaactgtgctacattcatcatatcatgggaaaggtgccagacgcttgcactgcctgcgatctggtcaatgtggatttggatgactgcatctctgaacaataaatgatttaaatcaggtatggctgccgatggttatcttccagattggctcgaggacactctctctgaaggaataagacagtggtggaagctcaaacctggcccaccaccaccaaagcccgcagagcggcataaggacgacagcaggggtcttgtgcttcctgggtacaagtacctcggacccttcaacggactcgacaagggagagccggtcaacgaggcagacgccgcggctctcgagcacgacaaggcctacgaccggcagctcgacagcggagacaacccgtacctcaagtacaaccacgccgacgcggagtttcaggagcgtcttaaagaagatacgtcttttgggggcaacctcggacgagcagtcttccaggcgaaaaagagggttcttgaacctctgggcctggttgaggaacctgttaagacggctccgggaaaaaagaggccggtagagcactctcctgcggagccagactcctcctcgggaaccggaaaagcgggccagcagcctgcaagaaaaagactgaatttcggtcagactggagacgcagactccgtacctgacccccagcctctcggacagccaccagcagcccccacaagtttgggatctactacaatggctacaggcagtggcgcaccaatggcagacaataacgagggtgccgatggagtgggtaattcctcaggaaattggcattgcgattcccaatggctgggcgacagagtcatcaccaccagcacccgaacctgggccctgcccacctacaacaaccacctttacaagcaaatctccagccaatcaggagcctcaaacgacaaccactactttggctacagcaccccctgggggtattttgacttcaacagattccactgccgcttttcaccacgtgactggcaaagactcatcaacaacaactggggattccgacccaagagactcaacttcaagctctttaacattcaagtcaaagaggtcacgcagaatgacggtacgacgacgattgccaataaccttaccagcacggttcaggtgtttactgactcggagtaccagctcccgtacgtcctcggctcggcgcatcaaggatgcctcccgccgtttccagcggacgtcttcatggtcccacagtatggatacctcaccctgaacaacgggagtcaggcggtaggacgctcttccttttactgcctggagtactttccttctcagatgctgcgtactggaaacaactttcagttcagctacacttttgaagacgtgcctttccacagcagctacgctcacagccagggtttggatcggctgatgaatcctctgatcgaccagtacctgtattatctaaacagaacacaaacagctagtggaactcagcagtctcggctactgtttagccaagctggacccacaagcatgtctcttcaagctaaaaactggctgcctggaccgtgttatcgccagcagcgtttgtcaaagcaggcaaacgacaacaacaacagcaactttccctggactggagctaccaagtaccacctcaatggcggagactctttggtgaacccgggcccggccatggccagccacaaggacgatgaagaaaagtttttccccatgcatggaaccctaatatttggtaaagaaggaacaaatgctaccaacgcggaattggaaaatgtcatgattacagatgaagaggaaatcaggaccaccaatcccgtggctacagagcagtacggatatgtgtcaaataatttgcaaaactcaaatactgctgcaagtactgaaactgtgaatcaccaaggagcattacctggtatggtgtggcaggatcgagacgtgtacctgcggggacccatttgggccaagattcctcacgccgatggacactttcatccttctccactgatgggaggttttggactcaaacacccgcctcctcagattatgatcaaaaacactcccgttccagccaatcctcccacaaacttcagttctgccaagtttgcttccttcatcacacagtattccacgggacaggtcagcgtggagatcgagtgggagctgcagaaggagaacagcaaacgctggaatcccgaaattcagtacacttccaactacaacaaatctgttaatgtggactttactgtggacactaatggtgtgtattcagagcctcgccccattggcaccagatacctgactcgtaatctgtaattgcttgttaatcaataaaccgtttaattcgtttcagttgaactttggtctctgcgaagggcgaattcgcggccgctaaattcaattcg

SEQ ID NO: 306 - protein, 734 aa, Artificial Sequence
  source: /note="Description of Artificial Sequence: Synthetic polypeptide"
MAADGYLPDWLEDTLSEGIRQWWKLKPGPPPPKPAERHKDDSRGLVLPGYKYLGPFNGLDKGEPVNEADAAALEHDKAYDRQLDSGDNPYLKYNHADAEFQERLKEDTSFGGNLGRAVFQAKKRVLEPLGLVEEPVKTAPGKKRPVEHSPAEPDSSSGTGKAGQQPARKRLNFGQTGDADSVPDPQPLGQPPAAPTSLGSTTMATGSGAPMADNNEGADGVGNSSGNWHCDSQWLGDRVITTSTRTWALPTYNNHLYKQISSQSGASNDNHYFGYSTPWGYFDFNRFHCHFSPRDWQRLINNNWGFRPKRLNFKLFNIQVKEVTQNDGTTTIANNLTSTVQVFTDSEYQLPYVLGSAHQGCLPPFPADVFMVPQYGYLTLNNGSQAVGRSSFYCLECFPSQMLRTGNNFQFSYTFEDVPFHSSYAHSQSLDRLMNPLIDQYLYYLNRTQTASGTQQSRLLFSQAGPTSMSLQAKNWLPGPCYRQQRLSKQANDNNNSNFPWTGATKYHLNGRDSLVNPGPAMASHKDDEEKFFPMHGTLIFGKEGTNATNAELENVMITDEEEIRTTNPVATEQYGYVSNNLQNSNTAASTETVNHQGALPGMVWQDRDVYLQGPIWAKIPHTDGHFHPSPLMGGFGLKHPPPQIMIKNTPVPANPPTNFSSAKFASFITQYSTGQVSVEIEWELQKENSKRWNPEIQYTSNYNKSVNVDFTVDTNGVYSEPRPIGTRYLTRNL

SEQ ID NO: 307 - DNA, 2208 bp, Artificial Sequence
  source: /note="Description of Artificial Sequence: Synthetic polynucleotide"
atggctgccgatggttatcttccagattggctcgaggacactctctctgaaggaataagacagtggtggaagctcaaacctggcccaccaccaccaaagcccgcagagcggcataaggacgacagcaggggtcttgtgcttcctggatacaagtacctcggacccttcaacggactcgacaagggagagccggtcaacgaggcagacgccgcggccctcgagcacgacaaggcctacgaccggcagctcgacagcggagacaacccgtacctcaagtacaaccacgccgacgcggagtttcaggagcgccttaaagaagatacgtcttttgggggcaacctcggacgagcagtcttccaggcgaaaaagagggttcttgaacctctgggcctggttgaggaacctgttaagacggctccgggaaaaaagaggccggtagagcactctcctgtggagccagactcctcctcgggaaccggaaaagcgggcaaccagcctgcaagaaaaagattgaatttcggtcagactggagacgcagactccgtacctgacccccagcctctcggacagccaccagcatccccctctggtctgggaactaatacgatggctacaggcagtggcgcaccaatggcagacaataacgagggcgccgacggagtgggtaattcctcgggaaattggcattgcgattccacatggatgggcgacagagtcgtcaccaccagcacccgcacctgggccctgcccacctacaacaaccacctctacaagcagatttccagccaatcaggagccagcaacgacaaccactactttggctacagcaccccttgggggtattttgacttcaacagattccactgccacttttcgccacgcgactggcagagactcatcaacaacaactggggattccggcccaaaagactcaacttcaagctgtttaacattcaagtcaaggaggtcacgcagaatgacggtacgacgacgattgccaataaccttaccagcacggttcaggtgtttactgacttggagtaccagctcccgtacgtcctcggctcggcgcatcaaggatgcctcccgccgttcccagcagacgtcttcatggtgccacagtatggatacctcaccctgaacaacgggagtcaggcggtaggacgctcttccttttactgcctggagtactttccttctcagatgcttcgcaccggaaacaactttaccttcagctacacttttgaagacgttcctttccacagcagctacgctcacagtcaaagtctggaccgtctcatgaatcctctcatcgaccagtacctgtattacttgagcagaacaaacactccaagcggaaccactacgcagtccaggcttcagttttctcaggccggagcgagtgacattcgggaccagtctaggaactggcttcctggaccctgttaccgccagcagcgagtatcaaagacagctgcggataacaacaacagtgaatactcgtggactggagctaccaagtaccacctcaatggcagagactctctggtgaatccgggcccggccatggccagccacaaggacgatgaagaaaagttttttcctcaaagcggggttctcatctttgggaagcaaggctcagagaaaacaaatgtggacattgaaaaggtcatgattacagacgaagaggaaatcaggaccaccaatcccgtggctacggagcagtatggttctgtatctaccaacctccagagcggcaacacacaagcagctacctcagatgtcaacacacaaggcgttcttccaggcatggtctggcaggacagagacgtgtacctgcaggggcccatctgggcaaaaattccacacacggacggacattttcacccctctcccctcatgggcggatttggacttaaacaccctcctccacagattctcattaagaataccccggtacctgcgaatccttcgaccaccttcagcgcggcaaagtttgcttccttcatcacacagtattccacggggcaggtcagcgtggagatcgagtgggagctgcagaaggagaacagcaaacgctggaatcccgaaattcagtacacttccaactacaacaaatctgttaatgtggactttactgtggacactaatggggtgtattcagagcctcgccctattggcaccagatacctgactcgtaatctgtaa

SEQ ID NO: 308 - DNA, 3159 bp, Artificial Sequence
  source: /note="Description of Artificial Sequence: Synthetic polynucleotide"
gattgatttagcggccgcgaattcgcccttgctgcgtcaactggaccaatgagaactttcccttcaacgattgcgtcgacaagatggtgatctggtgggaggagggaaagatgaccgccaaggtcgtggagtcggccaaagccattctcggaggaagcaaggtgcgtgtggaccaaaagtgcaagtcttcggcccagatcgacccgactcccgtgatcgtcacctccaacaccaacatgtgcgccgtgattgatggaaactcaacgaccttcgagcaccagcagccgttgcaagaccggatgttcaaatttgaacttacccgccgtctggatcatgactttggaaaggtcaccaagcaggaagtgaaagactttttccggtgggcaaaggatcacgtggttgaggtggagcatgagttctacgtcaaaaagggtggagccaaaaaaagacccgcccccagtgacgcagatataagtgagcccaaacgggcgcgcgagtcagttgcgcagccatcgacgtcagacgcggaagcttcgatcaactacgcggacaggtaccaaaacaaatgttctcgtcacgtgggcatgaatctgatgctgtttccctgcagacaatgcgagagaatgaatcagaattcaaatatctgcttcactcacggacagaaagactgtccatagtgctttcccgtgtcagaatctcaacccgtttctgtcgtcaaaaaggcgtatcagaaactgtgctacattcatcacatcatgggaaaggtgccagacgcttgcactgcttgcgacctggtcaatgtggatttggatgactgcatctctgaacaataaatgatttaaatcaggtatggctgccgatggttatcttccagattggctcgaggacactctctctgaaggaataagacagtggtggaagctcaaacctggcccaccaccaccaaagcccgcagagcggcataaggacgacagcaggggtcttgtgcttcctggatacaagtacctcggacccttcaacggactcgacaagggagagccggtcaacgaggcagacgccgcggccctcgagcacgacaaggcctacgaccggcagctcgacagcggagacaacccgtacctcaagtacaaccacgccgacgcggagtttcaggagcgccttaaagaagatacgtcttttgggggcaacctcggacgagcagtcttccaggcgaaaaagagggttcttgaacctctgggcctggttgaggaacctgttaagacggctccgggaaaaaagaggccggtagagcactctcctgtggagccagactcctcctcgggaaccggaaaagcgggcaaccagcctgcaagaaaaagattgaatttcggtcagactggagacgcagactccgtacctgacccccagcctctcggacagccaccagcatccccctctggtctgggaactaatacgatggctacaggcagtggcgcaccaatggcagacaataacgagggcgccgacggagtgggtaattcctcgggaaattggcattgcgattccacatggatgggcgacagagtcgtcaccaccagcacccgcacctgggccctgcccacctacaacaaccacctctacaagcagatttccagccaatcaggagccagcaacgacaaccactactttggctacagcaccccttgggggtattttgacttcaacagattccactgccacttttcgccacgcgactggcagagactcatcaacaacaactggggattccggcccaaaagactcaacttcaagctgtttaacattcaagtcaaggaggtcacgcagaatgacggtacgacgacgattgccaataaccttaccagcacggttcaggtgtttactgacttggagtaccagctcccgtacgtcctcggctcggcgcatcaaggatgcctcccgccgttcccagcagacgtcttcatggtgccacagtatggatacctcaccctgaacaacgggagtcaggcggtaggacgctcttccttttactgcctggagtactttccttctcagatgcttcgcaccggaaacaactttaccttcagctacacttttgaagacgttcctttccacagcagctacgctcacagtcaaagtctggaccgtctcatgaatcctctcatcgaccagtacctgtattacttgagcagaacaaacactccaagcggaaccactacgcagtccaggcttcagttttctcaggccggagcgagtgacattcgggaccagtctaggaactggcttcctggaccctgttaccgccagcagcgagtatcaaagacagctgcggataacaacaacagtgaatactcgtggactggagctaccaagtaccacctcaatggcagagactctctggtgaatccgggcccggccatggccagccacaaggacgatgaagaaaagttttttcctcaaagcggggttctcatctttgggaagcaaggctcagagaaaacaaatgtggacattgaaaaggtcatgattacagacgaagaggaaatcaggaccaccaatcccgtggctacggagcagtatggttctgtatctaccaacctccagagcggcaacacacaagcagctacctcagatgtcaacacacaaggcgttcttccaggcatggtctggcaggacagagacgtgtacctgcaggggcccatctgggcaaaaattccacacacggacggacattttcacccctctcccctcatgggcggatttggacttaaacaccctcctccacagattctcattaagaataccccggtacctgcgaatccttcgaccaccttcagcgcggcaaagtttgcttccttcatcacacagtattccacggggcaggtcagcgtggagatcgagtgggagctgcagaaggagaacagcaaacgctggaatcccgaaattcagtacacttccaactacaacaaatctgttaatgtggactttactgtggacactaatggggtgtattcagagcctcgccctattggcaccagatacctgactcgtaatctgtaattgcttgttaatcaataaaccgtttaattcgtttcagttgaactttggtctctgcgaagggcgaattcgtttaaacctgcaggactagtccctttagtgagg

SEQ ID NO: 309 - protein, 735 aa, Artificial Sequence
  source: /note="Description of Artificial Sequence: Synthetic polypeptide"
MAADGYLPDWLEDTLSEGIRQWWKLKPGPPPPKPAERHKDDSRGLVLPGYKYLGPFNGLDKGEPVNEADAAALEHDKAYDRQLDSGDNPYLKYNHADAEFQERLKEDTSFGGNLGRAVFQAKKRVLEPLGLVEEPVKTAPGKKRPVEHSPVEPDSSSGTGKAGNQPARKRLNFGQTGDADSVPDPQPLGQPPASPSGLGTNTMATGSGAPMADNNEGADGVGNSSGNWHCDSTWMGDRVVTTSTRTWALPTYNNHLYKQISSQSGASNDNHYFGYSTPWGYFDFNRFHCHFSPRDWQRLINNNWGFRPKRLNFKLFNIQVKEVTQNDGTTTIANNLTSTVQVFTDLEYQLPYVLGSAHQGCLPPFPADVFMVPQYGYLTLNNGSQAVGRSSFYCLEYFPSQMLRTGNNFTFSYTFEDVPFHSSYAHSQSLDRLMNPLIDQYLYYLSRTNTPSGTTTQSRLQFSQAGASDIRDQSRNWLPGPCYRQQRVSKTAADNNNSEYSWTGATKYHLNGRDSLVNPGPAMASHKDDEEKFFPQSGVLIFGKQGSEKTNVDIEKVMITDEEEIRTTNPVATEQYGSVSTNLQSGNTQAATSDVNTQGVLPGMVWQDRDVYLQGPIWAKIPHTDGHFHPSPLMGGFGLKHPPPQILIKNTPVPANPSTTFSAAKFASFITQYSTGQVSVEIEWELQKENSKRWNPEIQYTSNYNKSVNVDFTVDTNGVYSEPRPIGTRYLTRNL

SEQ ID NO: 310 - DNA, 2205 bp, Artificial Sequence
  source: /note="Description of Artificial Sequence: Synthetic polynucleotide"
atggctgccgatggttatcttccagattggctcgaggacactctctctgaaggaataagacagtggtggaagctcaaacctggcccaccaccaaagcccgcagagcggcataaggacgacagcaggggtcttgtgcttcctggatacaagtacctcggacccttcaacggactcgacaagggagagccggtcaacgaggcagacgccgcggccctcgagcacgacaaggcctacgaccggcagctcgacagcggagacaacccgtacctcaagtacaaccacgccgacgcggagtttcaggagcgccttaaagaagatacgtcttttgggggcaacctcggacgagcagtcttccaggcgaaaaagagggttcttgaacctctgggcctggttgaggaacctgttaagacggctccgggaaaaaagaggcccgtagagcactctcctgtggagccagactcctcctcgggaaccggaaaagcgggcaaccagcctgcaagaaaaagattgaatttcggtcagactggagacgcagactccgtacctgacccccagcctctcggacagccaccagcagccccctctggtctgggaactaatacgatggctacaggcagtggcgcaccaatggcagacaataacgagggcgccgacggagtgggtaattcctcgggagattggcattgcgattccacatggatgggcgacagagtcatcaccaccagcacccgcacctgggccctgcccacctacaacaaccacctctacaagcagatttccagccaatcaggagccagcaatgacaaccactactttggctacagcaccccttgggggtattttgacttcaacagattccactgccacttttcgccacgcgactggcagagactcatcaacaacaactggggattccggcccaaaagactcaacctcaagctgtttaacattcaagtcaaggaggtcacgcagaatgacggtacgacgacgattgccaataaccttaccagcacggttcaggtgtttactgacttggagtaccagctcccgtacgtcctcggctcggcgcatcaaggatgcctcccgccgttcccagcagacgtcttcatggtgccacagtatggatacctcaccctgaacaacgggagtcaggcggtaggacgctcttccttttactgcctggagtactttccttctcagatgcttcgtaccggaaacaactttaccttcagctacacttttgaagacgttcctttccacagcagctacgctcacagtcaaagtctggaccgtctcatgaatcctctcatcgaccagtacctgtattacttgagcagaacaaacactccaagcggaaccactacgcagtccaggcttcagttttctcaggccggagcgagtgacattcgggaccagtctaggaactggcttcctggaccctgttaccgccagcagcgagtatcaaagacagctgcggataacaacaacggtgaatactcgtggactggagctaccaagtaccacctcaatggcagagactctctggtgaatccgggcccggccatggccagccacaaggacgatgaagaaaagttttttcctcaaagcggggttctcatctttgggaagcaaggctcagagaaaacaaatgtggacattgaaaaggtcatgattacagacgaagaggaaatcaggaccaccaatcccgtggctacggagcagtatggttctgtatctaccaacctccagagcggcaacacacgagcagctacctcagatgtcaacacacaaggcgttcttccaggcatggtctggcaggacagagacgtgtacctgcaggggcccatctgggcaaaaattccacacacggacggacattttcacccctctcccctcatgggcggatttggacttaaacaccctcctccacagattctcattaagaataccccggtacctgcgaatccttcgaccaccttcagcgcggcaaagtttgcttccttcatcacacagtattccacggggcaggtcagcgtggagatcgagtgggagctgcagaaggagaacagcaaacgctggaatcccgaaattcagtacacttccaactacaacaaatctgttaatgtggactttactgtggacactaatggggtgtattcagagcctcgccctattggcaccagatacctgactcgtaatctgtaa

SEQ ID NO: 311 - DNA, 3156 bp, Artificial Sequence
  source: /note="Description of Artificial Sequence: Synthetic polynucleotide"
cgattgaatttagcggccgcgaattcgcccttgctgcgtcaacggaccaatgagaactttcccttcaacgattgcgtcgacaagatggtgatctggtgggaggagggaaagatgaccgccaaggtcgtggagtcggccaaagccattctcggaggaagcaaggtgcgtgtggaccaaaagtgcaagtcttcggcccagatcgacccgactcccgtgatcgtcacctccaacaccaacatgtgcgccgtgattgatggaaactcaacgaccttcgagcaccagcagccgttgcaagaccggatgttcaaatttgaacttacccgccgtctggatcatgactttggaaaggtcaccaagcaggaagtgaaagactttttccggtgggcaaaggatcacgtggttgaggtggagcatgagttctacgtcaaaaagggtggagccaaaaaaagacccgcccccagtgacgcagatataagtgagcccaaacgggcgcgcgagtcagttgcgcagccatcgacgtcagacgcggaagcttcgatcaactacgcggacaggtaccaaaacaaatgttctcgtcacgtgggcatgaatctgatgctgtttccctgcagacaatgcgagcgaatgaatcagaattcaaatatctgcttcactcacggacagaaagactgtttagagtgctttcccgtgtcagaatctcaacccgtttctgtcgtcaaaaaggcgtatcagaaactgtgctacattcatcacatcatgggaaaggtgccagacgcttgcactgcttgcgacctggtcaatgtggatttggatgactgcatctctgaacaataaatgatttaaatcaggtatggctgccgatggttatcttccagattggctcgaggacactctctctgaaggaataagacagtggtggaagctcaaacctggcccaccaccaaagcccgcagagcggcataaggacgacagcaggggtcttgtgcttcctggatacaagtacctcggacccttcaacggactcgacaagggagagccggtcaacgaggcagacgccgcggccctcgagcacgacaaggcctacgaccggcagctcgacagcggagacaacccgtacctcaagtacaaccacgccgacgcggagtttcaggagcgccttaaagaagatacgtcttttgggggcaacctcggacgagcagtcttccaggcgaaaaagagggttcttgaacctctgggcctggttgaggaacctgttaagacggctccgggaaaaaagaggcccgtagagcactctcctgtggagccagactcctcctcgggaaccggaaaagcgggcaaccagcctgcaagaaaaagattgaatttcggtcagactggagacgcagactccgtacctgacccccagcctctcggacagccaccagcagccccctctggtctgggaactaatacgatggctacaggcagtggcgcaccaatggcagacaataacgagggcgccgacggagtgggtaattcctcgggagattggcattgcgattccacatggatgggcgacagagtcatcaccaccagcacccgcacctgggccctgcccacctacaacaaccacctctacaagcagatttccagccaatcaggagccagcaatgacaaccactactttggctacagcaccccttgggggtattttgacttcaacagattccactgccacttttcgccacgcgactggcagagactcatcaacaacaactggggattccggcccaaaagactcaacctcaagctgtttaacattcaagtcaaggaggtcacgcagaatgacggtacgacgacgattgccaataaccttaccagcacggttcaggtgtttactgacttggagtaccagctcccgtacgtcctcggctcggcgcatcaaggatgcctcccgccgttcccagcagacgtcttcatggtgccacagtatggatacctcaccctgaacaacgggagtcaggcggtaggacgctcttccttttactgcctggagtactttccttctcagatgcttcgtaccggaaacaactttaccttcagctacacttttgaagacgttcctttccacagcagctacgctcacagtcaaagtctggaccgtctcatgaatcctctcatcgaccagtacctgtattacttgagcagaacaaacactccaagcggaaccactacgcagtccaggcttcagttttctcaggccggagcgagtgacattcgggaccagtctaggaactggcttcctggaccctgttaccgccagcagcgagtatcaaagacagctgcggataacaacaacggtgaatactcgtggactggagctaccaagtaccacctcaatggcagagactctctggtgaatccgggcccggccatggccagccacaaggacgatgaagaaaagttttttcctcaaagcggggttctcatctttgggaagcaaggctcagagaaaacaaatgtggacattgaaaaggtcatgattacagacgaagaggaaatcaggaccaccaatcccgtggctacggagcagtatggttctgtatctaccaacctccagagcggcaacacacgagcagctacctcagatgtcaacacacaaggcgttcttccaggcatggtctggcaggacagagacgtgtacctgcaggggcccatctgggcaaaaattccacacacggacggacattttcacccctctcccctcatgggcggatttggacttaaacaccctcctccacagattctcattaagaataccccggtacctgcgaatccttcgaccaccttcagcgcggcaaagtttgcttccttcatcacacagtattccacggggcaggtcagcgtggagatcgagtgggagctgcagaaggagaacagcaaacgctggaatcccgaaattcagtacacttccaactacaacaaatctgttaatgtggactttactgtggacactaatggggtgtattcagagcctcgccctattggcaccagatacctgactcgtaatctgtaattgcttgttaatcaataaaccgtttaattcgtttcagttgaactttggtctctgcgaagggcgaattcgtttaaacctgcaggactagtccctttagtgag

SEQ ID NO: 312 - protein, 734 aa, Artificial Sequence
  source: /note="Description of Artificial Sequence: Synthetic polypeptide"
MAADGYLPDWLEDTLSEGIRQWWKLKPGPPPKPAERHKDDSRGLVLPGYKYLGPFNGLDKGEPVNEADAAALEHDKAYDRQLDSGDNPYLKYNHADAEFQERLKEDTSFGGNLGRAVFQAKKRVLEPLGLVEEPVKTAPGKKRPVEHSPVEPDSSSGTGKAGNQPARKRLNFGQTGDADSVPDPQPLGQPPAAPSGLGTNTMATGSGAPMADNNEGADGVGNSSGDWHCDSTWMGDRVITTSTRTWALPTYNNHLYKQISSQSGASNDNHYFGYSTPWGYFDFNRFHCHFSPRDWQRLINNNWGFRPKRLNLKLFNIQVKEVTQNDGTTTIANNLTSTVQVFTDLEYQLPYVLGSAHQGCLPPFPADVFMVPQYGYLTLNNGSQAVGRSSFYCLEYFPSQMLRTGNNFTFSYTFEDVPFHSSYAHSQSLDRLMNPLIDQYLYYLSRTNTPSGTTTQSRLQFSQAGASDIRDQSRNWLPGPCYRQQRVSKTAADNNNGEYSWTGATKYHLNGRDSLVNPGPAMASHKDDEEKFFPQSGVLIFGKQGSEKTNVDIEKVMITDEEEIRTTNPVATEQYGSVSTNLQSGNTRAATSDVNTQGVLPGMVWQDRDVYLQGPIWAKIPHTDGHFHPSPLMGGFGLKHPPPQILIKNTPVPANPSTTFSAAKFASFITQYSTGQVSVEIEWELQKENSKRWNPEIQYTSNYNKSVNVDFTVDTNGVYSEPRPIGTRYLTRNL

SEQ ID NO: 313 - DNA, 2208 bp, Artificial Sequence
  source: /note="Description of Artificial Sequence: Synthetic polynucleotide"
atggctgccgatggttatcttccagattggctcgaggacactctctctgaaggaataagacagtggtggaagctcaaacctggcccaccaccaccaaagcccgcagagcggcataaggacgacagcaggggtcttgtgcttcctgggtacaagtacctcggacccttcaacggactcgacaagggagagccggtcaacgaggcagacgccgcggccctcgagcacgacaaggcctacgaccggcagctcgacagcggagacaacccgtacctcaagtacgaccacgccgacgcggagtttcaggagcgccttaaagaagatacgtcttttgggggcaacctcggacgagcagtcttccaggcaaaaaagagggttcttgaacctctgggcctggttgaggagcctgttaagacggctccgggaaaaaagaggccggtagagcactctcctgtggagccagactcctcctcgggaaccggaaaagcgggcaaccagcctgcaagaaagagattgaatttcggtcagactggagacgcagactccgtacctgacccccagcctctcggacagccaccagcagccccctctggtctgggaactaatacgatggctacaggcagtggcgcaccaatggcagacaataacgatggcgccgacggagtgggtaattcctcgggaaattggcattgcgattccacatggatgggcgacagagtcatcaccaccagcacccgaacctgggctctgcccacctacaacaaccatctgtacaagcagatttccagccaatcaggagccagcaacgacaaccactactttggctacagcaccccttgggggtattttgacttcaacagattccactgccacttttcaccacgtgactggcaaagactcatcaacaacaactggggattccggcccaagagactcaacttcaagctctttaacattcaagtcagagaggtcacgcagaatgatggtacgacgacgattgccaataaccttaccagcacggttcaggtgtttactgactcggagtaccagctcccgtacgtcctcggctcggcgcatcaaggatgcctcccgccgttcccagcagacgtcttcatggtgccacagtatggatacctcaccctgaacaacgggagtcaggcagtaggacgctcttcattttactgcctggagtacttcccttctcagatgctgcgtaccggaaacaactttaccttcagctacacctttgaggatgttcctttccacagcagctacgctcacagccagagtttggaccgtctcatgaatcctctcatcgaccagtacctgtattacttgagcagaacaaacactccaagcggaaccaccacgcagtccaggcttcagttttctcaggccggagcgagtgacattcgggatcagtctaggaactggcttcctggaccctgttaccgccagcagcgagtatcaaagacatctgcggacaacaacaacagtgaatactcgtggattggagctaccaagtaccacctcaatggcagagactctctggtgaatccgggcccggcaatggccagccacaaggacgatgaagaaaagttttttcctcagagcggggttctcatctttggaaaacaaggatcagagaaaacaaatgtggacattgaaaaggtcatgattacagacgaagaggaaatcagaaccaccaatcccgtggccacggagcagtatggttctgtatctaccaacctccagagcggcaacacacaagcatctactgcagatgtcaacacacaaggcgttcttccaggcatggtctggcaggacagagacgtgtacctgcaggggcctatctgggcaaagattccgcacacggacggacattttcacccctctcccctcatgggcggattcggacttaaacaccctcctccacagattctcatcaaaaacaccccggtacctgcgaatccttcgaccaccttcagtgcggcaaagtttgcttccttcatcacacagtattccacggggcgggtcagcgtggagatcgagtgggagctacagaaggagaacagcaaacgctggaatcccgagatccagtacacttccaactacaacaaatctgttaatgtggactttactgtggacactaatggtgtgtattcagagcctcgccccattggcaccagatacctgactcgtaatctgtaa

SEQ ID NO: 314 - protein, 735 aa, Artificial Sequence
  source: /note="Description of Artificial Sequence: Synthetic polypeptide"
MAADGYLPDWLEDTLSEGIRQWWKLKPGPPPPKPAERHKDDSRGLVLPGYKYLGPFNGLDKGEPVNEADAAALEHDKAYDRQLDSGDNPYLKYDHADAEFQERLKEDTSFGGNLGRAVFQAKKRVLEPLGLVEEPVKTAPGKKRPVEHSPVEPDSSSGTGKAGNQPARKRLNFGQTGDADSVPDPQPLGQPPAAPSGLGTNTMATGSGAPMADNNDGADGVGNSSGNWHCDSTWMGDRVITTSTRTWALPTYNNHLYKQISSQSGASNDNHYFGYSTPWGYFDFNRFHCHFSPRDWQRLINNNWGFRPKRLNFKLFNIQVREVTQNDGTTTIANNLTSTVQVFTDSEYQLPYVLGSAHQGCLPPFPADVFMVPQYGYLTLNNGSQAVGRSSFYCLEYFPSQMLRTGNNFTFSYTFEDVPFHSSYAHSQSLDRLMNPLIDQYLYYLSRTNTPSGTTTQSRLQFSQAGASDIRDQSRNWLPGPCYRQQRVSKTSADNNNSEYSWIGATKYHLNGRDSLVNPGPAMASHKDDEEKFFPQSGVLIFGKQGSEKTNVDIEKVMITDEEEIRTTNPVATEQYGSVSTNLQSGNTQASTADVNTQGVLPGMVWQDRDVYLQGPIWAKIPHTDGHFHPSPLMGGFGLKHPPPQILIKNTPVPANPSTTFSAAKFASFITQYSTGRVSVEIEWELQKENSKRWNPEIQYTSNYNKSVNVDFTVDTNGVYSEPRPIGTRYLTRNL

SEQ ID NO: 315 - DNA, 2217 bp, Artificial Sequence
  source: /note="Description of Artificial Sequence: Synthetic polynucleotide"
atggctgccgatggttatcttccagattggctcgaggacaacctctctgagggcattcgcgagtggtgggacttgaaacctggagccccgaaacccaaagccaaccagcaaaagcaggacgacggccggggtctggtgcttcctggctacaagtacctcggacccttcaacggactcgacaagggggagcccgtcaacgcggcggacgcagcggccctcgagcacgacaaggcctacgaccagcagctcaaagcgggtgacaatccgtacctgcggtataaccacgccgacgccgagtttcaggagcgtctgcaagaagatacgtcttttgggggcaacctcgggcgagcagtcttccaggccaagaagcgggttctcgaacctctcggtctggttgaggaaggcgctaagacggctcctggaaagaagagaccggtagagccatcaccccagcgttctccagactcctctacgggcatcggcaagacaggccagcagcccgcgaaaaagagactcaactttgggcagactggcgactcagagtcagtgcccgaccctcaaccaatcggagaaccccccgcaggcccctctggtctgggatctggtacaatggctgcaggcggtggcgctccaatggcagacaataacgaaggcgccgacggagtgggtagttcctcaggaaattggcattgcgattccgcatggctgggcgacagagtcatcaccaccagcacccgaccctgggccctccccacctacaacaaccacctctacaagcaaatctccaacgggacatcgggaggaagcaccaacgacaacacctacttcggctacagcaccccctgggggtattttgactttaacagattccactgccacttctcaccacgtgactggcagcgactcatcaacaacaactggggattccggcccaagagactcaacttcaagctcttcaacatccaggtcaaggaggtcacgcagaatgaaggcaccaagaccatcgccaataaccttaccagcacgattcaggtctttacggactcggaataccagctcccgtacgtcctcggctctgcgcaccagggctgcccgcctccgttcccggcggacgtcttcatgattcctcagtacgggtacctgactctgaacaacggcagtcaggccgtgggccgttcctccttctactgcctggagtactttccttctcaaatgcggagaacgggcaacaactttgagttcagctaccagtttgaggacgtgccttttcacagcagctacgcgcatagccaaagcctggaccggctgatgaaccccctcatcgaccagtacctgtactacctgtctcggactcagtccacgggaggtaccgcaggaactcagcagttgctattttctcaggccgggcctaataacatgtcggctcaggccaaaaactggctacccgggccctgctaccggcagcaacgcgtctccacgacactgtcgcaaaataacaacagcaactttgcttggaccggtgccaccaagtatcatctgaatggcagagactctctggtaaatcccggtgtcgctatggcaacgcacaaggacgacgaagagcgattttttccatccagcggagtcttgatgtttgggaaacagggagctggaaaagacaacgtggactatagcagcgttatgctaaccagtgaggaagaaatcaaaaccaccaacccagtggccacagaacagtacggcgtggtggccgataacctgcaacagcaaaacgccgctcctattgtaggggccgtcaacagtcaaggagccttacctggcatggtctggcagaaccgggacgtgtacctgcagggtcctatctgggccaagattcctcacacggacggcaactttcatccttcgccgctgatgggaggctttggactgaaacacccgcctcctcagatcctgattaagaatacacctgttcccgcggatcctccaactaccttcagtcaagccaagctggcgtcgttcatcacgcagtacagcaccggacaggtcagcgtggaaattgaatgggagctgcagaaagagaacagcaagcgctggaacccagagattcagtatacttccaactactacaaatctacaaatgtggactttgctgtcaatactgagggtacttattcagagcctcgccccattggcacccgttacctcacccgtaacctgtaa

SEQ ID NO: 316 - protein, 738 aa, Artificial Sequence
  source: /note="Description of Artificial Sequence: Synthetic polypeptide"
MAADGYLPDWLEDNLSEGIREWWDLKPGAPKPKANQQKQDDGRGLVLPGYKYLGPFNGLDKGEPVNAADAAALEHDKAYDQQLKAGDNPYLRYNHADAEFQERLQEDTSFGGNLGRAVFQAKKRVLEPLGLVEEGAKTAPGKKRPVEPSPQRSPDSSTGIGKTGQQPAKKRLNFGQTGDSESVPDPQPIGEPPAGPSGLGSGTMAAGGGAPMADNNEGADGVGSSSGNWHCDSAWLGDRVITTSTRPWALPTYNNHLYKQISNGTSGGSTNDNTYFGYSTPWGYFDFNRFHCHFSPRDWQRLINNNWGFRPKRLNFKLFNIQVKEVTQNEGTKTIANNLTSTIQVFTDSEYQLPYVLGSAHQGCPPPFPADVFMIPQYGYLTLNNGSQAVGRSSFYCLEYFPSQMRRTGNNFEFSYQFEDVPFHSSYAHSQSLDRLMNPLIDQYLYYLSRTQSTGGTAGTQQLLFSQAGPNNMSAQAKNWLPGPCYRQQRVSTTLSQNNNSNFAWTGATKYHLNGRDSLVNPGVAMATHKDDEERFFPSSGVLMFGKQGAGKDNVDYSSVMLTSEEEIKTTNPVATEQYGVVADNLQQQNAAPIVGAVNSQGALPGMVWQNRDVYLQGPIWAKIPHTDGNFHPSPLMGGFGLKHPPPQILIKNTPVPADPPTTFSQAKLASFITQYSTGQVSVEIEWELQKENSKRWNPEIQYTSNYYKSTNVDFAVNTEGTYSEPRPIGTRYLTRNL

SEQ ID NO: 317 - protein, 735 aa, Artificial Sequence
  source: /note="Description of Artificial Sequence: Synthetic polypeptide"
MAADGYLPDWLEDTLSEGIRQWWKLKPGPPPPKPAERHKDDSRGLVLPGYKYLGPFNGLDKGEPVNEADAAALEHDKAYDRQLDSGDNPYLKYNHADAEFQERLKEDTSFGGNLGRAVFQAKKRVLEPLGLVEEPVKTAPGKKRPVEHSPVEPDSSSGTGKAGQQPARKRLNFGQTGDADSVPDPQPLGQPPAAPSGLGSTTMATGSGAPMADNNEGADGVGNSSGNWHCDSQWLGDRVITTSTRTWALPTYNNHLYKQISSQSGASNDNHYFGYSTPWGYFDFNRFHCHFSPRDWQRLINNNWGFRPKRLNFKLFNIQVKEVTQNDGTTTIANNLTSTVQVFTDSEYQLPYVLGSAHQGCLPPFPADVFMVPQYGYLTLNNGSQAVGRSSFYCLEYFPSQMLRTGNNFQFSYTFEDVPFHSSYAHSQSLDRLMNPLVDQYLYYLNKTQTNSGTLQQSRLLFSQAGPTNMSLQAKNWLPGPCYRQQRLSKQANDNNNSNFPWTAATKYHLNGRDSLVNPGPAMASHKDDEEKFFPMHGTLIFGKQGTNANDADLENVMITDEEEIRTTNPVATEQYGTVSNNLQNSNTGPTTGTVNHQGALPGMVWQDRDVYLQGPIWAKIPHTDGHFHPSPLMGGFGLKHPPPQIMIKNTPVPANPPTNFSSAKFASFITQYSTGQVSVEIEWELQKENSKRWNPEIQYTSNYNKSVNVDFTVDTNGVYSEPRPIGTRYLTRNL

SEQ ID NO: 318 - DNA, 3158 bp, Artificial Sequence
  source: /note="Description of Artificial Sequence: Synthetic polynucleotide"
gattgaatttagcggccgcgaattcgcccttgctgcgtcaactggaccaatgagaactttcctttcaatgattgcgtcgacaagatggtgatctggtgggaggagggaaagatgaccgccaaggtcgtggagtcggccaaagccattctcggaggaagcaaggtgcgcgcggaccagaaatgcaagtcctcggcccagatagacccgactcccgtgattgtcacctccaacaccaacatgtgcgccgtgattgacgggaactcaacgaccttcgaacaccagcagccgttgcaagaccggatgttcaaatttgaactcacccgccgtctggatcatgactttgggaaggtcaccaagcaggaagtcaaagactttttccggtgggcaaaggatcacgtggttgaggtggagcatgaattctacgtcaaaaagggtggagctaagaaaagacccgcccccagtgacgcagatataagtgagcccaaacgggcgcgcgagtcagttgcgcagccatcgacgtcagacgcggaagcttcgatcaactacgcgggcaggtaccaaaacaaatgttctcgtcacgtgggcatgaatctgatgctgtttccctgcagacaatgcgagagaatgaatcagaattcaaatatctgcttcactcacggacagaaagactgtttagagtgctttcccgtgtcagaatctcaacccgtttctgtcgtcaaaaaggcgtatcagaaactttgctacattcatcatatcatgggaaaggtgccagacgcttgcactgcctgcgatctggtcaatgtggatttggatgactgcatctctgaacaataaatgatttaaatcaggtatggctgccgatggttatcttccagattggctcgaggacactctctctgaaggaataagacagtggtggaagctcaaacctggcccaccaccaccaaagcccgcagagcggcataaggacgacagcaggggtcttgtgcttcctgggtacaagtacctcggacccttcaacggactcgacaagggggagccggtcaacgaggcagacgccgcggccctcgagcacgacaaggcctacgaccggcagctcgacagcggagacaacccgtacctcaagtacaaccacgccgacgcggagtttcaggagcgccttaaagaagatacgtcttttgggggcaacctcggacgagcagtcttccaggcaaaaaagagggttcttgaacctctgggcctggttgaggaacctgttaaaacggctccgggaaaaaagaggccggtagagcactctcctgtggagccagactcctcctcgggaaccggaaaagcgggccagcagcctgcaagaaaaagattgaatttcggtcagactggagacgcagactccgtacctgacccccagcctctcggacagccaccagcagccccctctggtctgggatctactacaatggctacaggcagtggcgcaccaatggcagacaataacgagggtgccgatggagtgggtaattcctcgggaaattggcattgcgattcccaatggctgggcgacagagtcatcaccaccagcacccgcacctgggccctgcccacctacaacaaccacctctacaagcaaatctccagccaatcaggagcctcaaacgacaaccactactttggctacagcaccccctgggggtattttgacttcaacagattccactgccacttttcaccacgtgactggcaaagactcatcaacaacaactggggattccgacccaagagactcaacttcaagctctttaacattcaagtcaaagaggtcacgcagaatgacggtacgacgacgattgccaataaccttaccagcacggttcaggtgtttactgactcggagtaccagctcccgtacgtcctcggctcggcgcatcaaggatgcctcccgccgtttccagcggacgtcttcatggtcccacagtatggatacctcaccctgaacaacgggagtcaggcagtaggacgctcttcattttactgcctggagtactttccttctcagatgctgcgtaccggaaacaactttcaattcagctacacttttgaagacgtgcctttccacagcagctacgctcacagccagagtctggatcggctgatgaatcctctggtcgaccagtacctgtattatctgaacaagacacaaacaaatagtggaactcttcagcagtctcggctactgtttagccaagctggacccaccaacatgtctcttcaagctaaaaactggctgcctggaccttgctacagacagcagcgtctgtcaaagcaggcaaacgacaacaacaacagcaactttccctggactgcagctacaaagtatcatctaaatggccgggactcgttggttaatccaggaccagctatggccagtcacaaggatgacgaagaaaagtttttccccatgcatggaacccttatatttggtaaacaaggaacaaatgccaacgacgcggatttggaaaatgtcatgattacagatgaagaagaaatcaggaccaccaatcccgtggctacggagcagtacggaactgtatcaaataatttgcaaaactcaaacactggtccaactactggaactgtcaatcaccaaggagcgttacctggtatggtgtggcaggatcgagacgtgtacctgcagggacccatttgggccaagattcctcacaccgatggacactttcatccttctccactgatgggaggttttggactcaaacacccacctcctcaaatcatgatcaaaaacactcccgttccagccaatcctcccacaaacttcagttctgccaagtttgcttctttcatcacacagtattccacggggcaggtcagcgtggagatcgagtgggagctgcagaaggagaacagcaaacgctggaatcccgaaattcagtacacttccaactacaacaaatctgttaatgtggactttactgtggacactaatggtgtgtattcagagcctcgccccattggcaccagatacctgactcgtaatctgtaattgcttgttaatcaataaaccgtttaattcgtttcagttgaactttggtctctgcgaagggcgaattcgtttaaacctgcaggactagtccctttagtga

SEQ ID NO: 319 - protein, 735 aa, Artificial Sequence
  source: /note="Description of Artificial Sequence: Synthetic polypeptide"
MAADGYLPDWLEDTLSEGIRQWWKLKPGPPPPKPAERHKDDSRGLVLPGYKYLGPFNGLDKGEPVNEADAAALEHDKAYDRQLDSGDNPYLKYNHADAEFQERLKEDTSFGGNLGRAVFQAKKRVLEPLGLVEEPVKTAPGKKRPVEHPPVEPDSSSGTGKAGQQPARKRLNFGQTGDADSVPDPQPLGQPPAAPSGLGSTTMATGSGAPMADNNEGADGVGNSSGNWHCDSQWLGDRVITTSTRTWALPTYNNHLYKQISSQSGASNDNHYFGYSTPWGYFDFNRFHCHFSPRDWQRLINNNWGFRPKRLNFKLFNIQVKEVTQNDGTTTIANNLTSTVQVFTDSEYQLPYVLGSAHQGCLPPFPADVFMVPQYGYLTLNNGSQAVGRSSFYCLEYFPSQMLRTGNNFQFSYTFEDVPFHSSYAHSQSLDRLMNPLIDQYLYYLNKTQTNSGTLQQSRLLFSQAGPTNMSLQAKNRLPGPCYRQQRLSKQANDNNNSNFPWTAATKYHLNGRDSLVNPGPAMASHKDDEEKFFPMHGTLIFGKQGTNANDADLENVMITDEEEIRTTNPVATEQYGTVSNNLQNSNTGPTTGTVNHQGALPGMVWQDRDVYLQGPIWAKIPHTDGHFHPSPLVGGFGLKHPPPQIMIKNTPVPANPPTNFSSAKFASFITQYSTGQVSVEIEWELQKENSKRWNPEIQYTSNYNKSVNVDFTVDTNGVYSEPRPIGTRYLTRNL

SEQ ID NO: 320 - DNA, 3159 bp, Artificial Sequence
  source: /note="Description of Artificial Sequence: Synthetic polynucleotide"
gattgaatttagcggccgcgaattcgcccttgctgcgtcaactggaccaatgagaactttcctttcaatgattgcgtcgacaagatggtgatctggtgggaggagggaaagatgaccgccaaggtcgtggagtcggccaaagccattctcggaggaagcaaggtgcgcgtggaccagaaatgcaagtcctcggcccagatagacccgactcccgtgattgtcacctccaacaccgacatgtgcgccgtgattgacgggaactcaacgaccttcgaacaccagcagccgttgcaagaccggatgttcaaatttgaactcacccgccgtctggatcatgactttgggaaggtcaccaagcaggaagtcaaagactttttccggtgggcaaaggatcacgtggttgaggtggagcatgaattctacgtcaaaaagggtggagctaagaaaagacccgcccccagtgacgcagatataagtgagcccaaacgggcgcgcgagtcagttgcgcagccatcgacgtcagacgcggaagcttcgatcaactacgcggacaggtaccaaaacaaatgttctcgtcacgtgggcatgaatctgatgctgtttccctgcagacaatgcgagagaatgaatcagaattcaaatatctgcttcactcacggacagaaagactgtttagagtgctttcccgtgtcagaatctcaacccgtttctgtcgtcaaaaaggcgtatcagaaactttgctacattcatcatatcatgggaaaggtgccagacgcttgcactgcctgcgatctggtcaatgtggatttggatgactgcatctctgaacaataaatgatttaaatcaggtatggctgccgatggttatcttccagattggctcgaggacactctctctgaaggaataagacagtggtggaagctcaaacctggcccaccaccaccaaagcccgcagagcggcataaggacgacagcaggggtcttgtgcttcctgggtacaagtacctcggacccttcaacggactcgacaagggggagccggtcaacgaggcagacgccgcggccctcgagcacgacaaggcctacgaccggcagctcgacagcggagacaacccgtacctcaagtacaaccacgccgacgcggagtttcaggagcgccttaaagaagatacgtcttttgggggcaacctcggacgagcagtcttccaggcaaaaaagagggttcttgaacctctgggcctggttgaggaacctgttaaaacggctccgggaaaaaagaggccggtagagcaccctcctgtggagccagactcctcctcgggaaccggaaaagcgggccagcagcctgcaagaaaaagattgaatttcggtcagactggagacgcagactccgtacctgacccccagcctctcggacagccaccagcagccccctctggtctgggatctactacaatggctacaggcagtggcgcaccaatggcagacaataacgagggtgccgatggagtgggtaattcctcgggaaattggcattgcgattcccaatggctgggcgacagagtcatcaccaccagcacccgcacctgggccctgcccacctacaacaaccacctctacaagcaaatctccagccaatcaggagcctcaaacgacaaccactactttggctacagcaccccctgggggtattttgacttcaacagattccactgccacttttcaccacgtgactggcaaagactcatcaacaacaactggggattccgacccaagagactcaacttcaagctctttaacattcaagtcaaagaggtcacgcagaatgacggtacgacgacgattgccaataaccttaccagcacggttcaggtgtttactgactcggagtaccagctcccgtacgtcctcggctcggcgcatcaaggatgcctcccgccgtttccagcggacgtcttcatggtcccacagtatggatacctcaccctgaacaacgggagtcaggcagtaggacgctcttcattttactgcctggagtactttccttctcagatgctgcgtaccggaaacaactttcagttcagctacacttttgaagacgtgcctttccacagcagctacgctcacagccagagtctggatcggctgatgaatcctctgatcgaccagtacctgtattatctgaacaagacacaaacaaatagtggaactcttcagcagtctcggctactgtttagccaagctggacccaccaacatgtctcttcaagctaaaaaccggctgcctggaccttgctacagacagcagcgtctgtcaaagcaggcaaacgacaacaacaacagcaactttccctggaccgcagctacaaagtatcatctaaatggccgggactcgttggttaatccaggaccagctatggccagtcacaaggatgacgaagaaaagtttttccccatgcatggaacccttatatttggtaaacaaggaacaaatgccaacgacgcggatttggaaaatgtcatgattacagatgaagaagaaatcaggaccaccaatcccgtggctacggagcagtacggaactgtatcaaataatttgcaaaactcaaacactggtccaactactggaactgtcaatcaccaaggagcgttacctggtatggtgtggcaggatcgagacgtgtacctgcagggacccatttgggccaagattcctcacaccgatggacactttcatccttctccactggtgggaggttttggactcaaacacccacctcctcaaatcatgatcaaaaacactcccgttccagccaatcctcccacaaacttcagttctgccaagtttgcttctttcatcacacagtattccacggggcaggtcagcgtggagatcgagtgggagctgcagaaggagaacagcaaacgctggaatcccgaaattcagtacacttccaactacaacaaatctgttaatgtggactttactgtggacactaatggtgtgtattcagagcctcgccccattggcaccagatacctgactcgtaatctgtaattgcttgttaatcaataaaccgtttaattcgtttcagttgaactttggtctctgcgaagggcgaattcgtttaaacctgcaggactagtccctttagtgag

SEQ ID NO: 321 - DNA, 2208 bp, Artificial Sequence
  source: /note="Description of Artificial Sequence: Synthetic polynucleotide"
atggctgccgatggttatcttccagattggctcgaggacactctctctgaaggaataagacagtggtggaagctcaaacctggcccaccaccaccaaagcccgcagagcggcataaggacgacagcaggggtcttgtgcttcctgggtacaagtaccttggacccttcaacggactcgacaagggagagccggtcaacgaggcagacgccgcggccctcgagcacgacaaggcctacgaccggcagctcgacagcggagacaacccgtaccccaagtacaaccacgccgacgcggagttccaggagcgtcttaaagaagatacgtcttttgggggcaacctcggacgagcagtcttccaggcgaaaaagagggttcttgaacctctgggcctggttgaggaacctgttaagacggctccgggaaaaaagaggccggtagagcactctcctgcggagccagactcctcctcgggaaccggaaaagcgggccagcagcctgcaagaaagagattgaatttcggtcagactggagacgcagactccgtacctgacccccagcctctcggacagccaccagcagccccctctggtctgggaactaatacgatggctacaggcagtggcgcaccaatggcagacaataacgagggcgccgacggagtgggtaattcctcgggaaattggcattgcgattccacatggatgggcgacagagtcatcaccaccagcacccgcacctgggctctgcccacctacaacaaccacctctacaagcagatttccagccaatcaggagcctcaaacgacaaccactactttggctacagcaccccttgggggtattttgacttcaacagattccactgccacttttcgccacgtgactggcaaagactcatcaacaacaattggggattccggcccaaaagactcaacttcaagctctttaacattcaagtcaaggaggtcacgcagaatgacggtacgacgacgattgccaataaccttaccagcacggttcaggtgtttactgactcggagtaccagctcccgtacgtcctcggctcggcgcatcaaggatgcctcccgccgttcccagcagacgtcttcatggtgccacagtatggatacctcaccctgaacaacgggagtcaggcagtaggacgctcttcattttactgcctggagtactttccttctcagatgctgcgtaccggaaacaactttaccttcagctacacctttgaggacgttcctttccacagcagctacgcccacagccagagtttggaccgtctcatgaatcctctcatcgaccagtacctgtattacttgagcagaacaaacactccaagcggaaccaccacgcagtcaaggcttcagttttctcaggccggagcaagtgacattcgggaccagtctaggaactggcttcctggaccctgttaccgccagcagcgagtatcaaagacatctgcggataacaacaacagtgaatactcgtggactggagctaccaagtaccaccttaatggaagagactctctggtgaatccgggcccggccatggccagccacaaggacgatgaagaaaagttttttcctcagagcggggttctcatctttggaaaacaagactcgggaaaaactaatgtggacattgaaaaggtcatgattacagacgaagaggaaatcaggaccaccaatcccgtggctacggagcagtatggttctgtatctaccaacctccagagcggcaacacacaagcagctacctcagatgtcaacacacaaggcgttcttccaggcatggtgtggcaggacagagacgtgtacctgcaggggcccatctgggcaaagattccacacacggacggacattttcacccctctcccctcatgggcggattcggacttaaacaccctcccccgcagattctcatcaagaacaccccggtacctgcgaatccttcgactaccttcagtgcggcaaagtttgcttccttcattacacagtactccacggggcaggtcagcgtggagatcgagtgggagctgcagaaggagaacagcaaacgctggaatcccgagattcagtacacttccaactacaacaaatctgttaatgtggactttactgtggacactaatggtgtgtattcagagcctcgccccattggcaccaggtacctgactcgtaatctgtaa

SEQ ID NO: 322 - protein, 735 aa, Artificial Sequence
  source: /note="Description of Artificial Sequence: Synthetic polypeptide"
MAADGYLPDWLEDTLSEGIRQWWKLKPGPPPPKPAERHKDDSRGLVLPGYKYLGPFNGLDKGEPVNEADAAALEHDKAYDRQLDSGDNPYPKYNHADAEFQERLKEDTSFGGNLGRAVFQAKKRVLEPLGLVEEPVKTAPGKKRPVEHSPAEPDSSSGTGKAGQQPARKRLNFGQTGDADSVPDPQPLGQPPAAPSGLGTNTMATGSGAPMADNNEGADGVGNSSGNWHCDSTWMGDRVITTSTRTWALPTYNNHLYKQISSQSGASNDNHYFGYSTPWGYFDFNRFHCHFSPRDWQRLINNNWGFRPKRLNFKLFNIQVKEVTQNDGTTTIANNLTSTVQVFTDSEYQLPYVLGSAHQGCLPPFPADVFMVPQYGYLTLNNGSQAVGRSSFYCLEYFPSQMLRTGNNFTFSYTFEDVPFHSSYAHSQSLDRLMNPLIDQYLYYLSRTNTPSGTTTQSRLQFSQAGASDIRDQSRNWLPGPCYRQQRVSKTSADNNNSEYSWTGATKYHLNGRDSLVNPGPAMASHKDDEEKFFPQSGVLIFGKQDSGKTNVDIEKVMITDEEEIRTTNPVATEQYGSVSTNLQSGNTQAATSDVNTQGVLPGMVWQDRDVYLQGPIWAKIPHTDGHFHPSPLMGGFGLKHPPPQILIKNTPVPANPSTTFSAAKFASFITQYSTGQVSVEIEWELQKENSKRWNPEIQYTSNYNKSVNVDFTVDTNGVYSEPRPIGTRYLTRNL

SEQ ID NO: 323 - DNA, 2208 bp, Artificial Sequence
  source: /note="Description of Artificial Sequence: Synthetic polynucleotide"
atggctgccgatggttatcttccagattggctcgaggacactctctctgaaggaataagacagtggtggaagctcaaacctggcccaccaccaccaaagcccgcagagcggcataaggacgacagcaggggtcttgtgcttcctgggtacaagtaccttggacccttcaacggactcgacaagggagagccggtcaacgaggcagacgccgcggccctcgagcacgacaaggcctacgaccggcagctcgacggcggagacaacccgtacctcaagtacaaccacgccgacgcggagttccaggagcgtcttaaagaagatacgtcttttgggggcaacctcggacgagcagtcttccaggcgaaaaagagggttcttgaacctctgggcctggttgaggaacctgttaagacggctccgggaaaaaagaggccggtagagcactctcttgcggagccagactcctcctcgggaaccggaaaagcgggccagcagcctgcaagaaggagattgaatttcggtcagactggagacgcagactccgtacctgacccccagcctctcggacagccaccagcagccccctctggtctgggaactaatacgatggctacaggcagtggcgcaccaatggcagacaataacgagggcgccgacggagtgggtaattcctcgggaaattggcattgcgattccacatggatgggcgacagagtcatcaccaccagcacccgcacctgggctctgcccacctacaacaaccacctctacaggcagatttccagccaatcaggagcctcaaacgacaaccactactttggctacagcaccccttgggggtattttgacttcaacagattccactgccacttttcgccacgtgactggcaaagactcatcaacaacaattggggatcccggcccaaaagactcaacttcaagctctttaacattcaagtcaaggaggtcacgcagaatgacggtacgacgacgattgccaataaccttaccagcacggttcaggtgtttactgactcggagtaccagctcccgtacgtcctcggctcggcgcatcaaggatgcctcccgccgttcccagcagacgtcttcatggtgccacagtatggatacctcaccctgaacaacgggagtcaggcagtaggacgctcttcattttactgcctggagtactttccttctcagatgctgcgtaccggaaacaactttaccttcagctacacctttgaggacgttcctttccacagcagctacgcccacagccagagtttggaccgtctcatgaatcctctcgtcgaccagtacctgtattacttgagcagaacaaacactccaagcggaaccaccacgcagtcaaggcttcagttttctcaggccggagcaagtgacattcgggaccagtctaggaactggcttcctggaccctgttaccgccagcagcgagtatcaaagacatctgcggataacaacaacagtgaatactcgtggactggagctaccaagtaccaccttaatggaagagactctctggtgaatccgggcccggccatggccagccacaaggacgatgaagaaaagttttttcctcagagcggggttctcatctttggaaaacaagactcgggaaaaactaatgtggacattgaaaaggtcatgattacagacgaagaggaaatcaggaccaccaatcccgtggctacggagcagtatggttctgtatctaccaacctccagagcggcaacacacaagcagctacctcagatgtcaacacacaaggcgttcttccaggcatggtgtggcaggacagagacgtgtacctgcaggggcccatctgggcaaagattccacacacggacggacattttcacccctctcccctcatgggcggattcggacttaaacaccctcccccgcagattctcatcaagaacaccccggtacctgcgaatccttcgactaccttcagtgcggcaaagtttgcttccttcattacacagtactccacggggcaggtcagcgtggagatcgagtgggagctgcagaaggagaacagcaaacgctggaatcccgagattcagtacacttccaactacaacaaatctgttaatgtggactttactgtggacactaatggtgtgtattcagagcctcgccccattggcaccagatacctgactcgtaatctgtaa

SEQ ID NO: 324 - protein, 735 aa, Artificial Sequence
  source: /note="Description of Artificial Sequence: Synthetic polypeptide"
MAADGYLPDWLEDTLSEGIRQWWKLKPGPPPPKPAERHKDDSRGLVLPGYKYLGPFNGLDKGEPVNEADAAALEHDKAYDRQLDGGDNPYLKYNHADAEFQERLKEDTSFGGNLGRAVFQAKKRVLEPLGLVEEPVKTAPGKKRPVEHSLAEPDSSSGTGKAGQQPARRRLNFGQTGDADSVPDPQPLGQPPAAPSGLGTNTMATGSGAPMADNNEGADGVGNSSGNWHCDSTWMGDRVITTSTRTWALPTYNNHLYRQISSQSGASNDNHYFGYSTPWGYFDFNRFHCHFSPRDWQRLINNNWGSRPKRLNFKLFNIQVKEVTQNDGTTTIANNLTSTVQVFTDSEYQLPYVLGSAHQGCLPPFPADVFMVPQYGYLTLNNGSQAVGRSSFYCLEYFPSQMLRTGNNFTFSYTFEDVPFHSSYAHSQSLDRLMNPLVDQYLYYLSRTNTPSGTTTQSRLQFSQAGASDIRDQSRNWLPGPCYRQQRVSKTSADNNNSEYSWTGATKYHLNGRDSLVNPGPAMASHKDDEEKFFPQSGVLIFGKQDSGKTNVDIEKVMITDEEEIRTTNPVATEQYGSVSTNLQSGNTQAATSDVNTQGVLPGMVWQDRDVYLQGPIWAKIPHTDGHFHPSPLMGGFGLKHPPPQILIKNTPVPANPSTTFSAAKFASFITQYSTGQVSVEIEWELQKENSKRWNPEIQYTSNYNKSVNVDFTVDTNGVYSEPRPIGTRYLTRNL

SEQ ID NO: 325 - protein, 738 aa, Artificial Sequence
  source: /note="Description of Artificial Sequence: Synthetic polypeptide"
MAADGYLPDWLEDNLSEGIREWWDLKPGAPKPKANQQKQDDGRGLVLPGYKYLGPFNGLDKGEPVNAADAAALEHDKAYDQQLKAGDNPYLRYNHADAEFQERLQEDTSFGGNLGRAVFQAKKRVLEPLGLVEEAAKTAPGKKRPVEPSPQRSPDSSAGIGKKGQQPAKKRLNFGQTGDSESVPDPQPIGEPPAGPSGLGSGTMAAGGGAPMADNNEGADGVGSSSGNWHCDSTWLGDRVITTSTRTWALPTYNNHLYKQISNGTSGGSTNDNTYFGYSTPWGYFDFNRFHCHFSPRDWQRLINNNWGFRPKRLSFKLFNIQVKEVTQNEGTETIANNLTSTIQVFTDSEYQLPYVLGSAHQGCLPPFPADVFMIPQYGYLTLNNGSQAVGRSSFYCLEYFPSQMLRTGNNFEFSYTFEDVPFHSSCAHSQSSDRLMNPLIDQYLYYLSRTRSTGGTQGTQQLLFSQAGPANMSAQAKNWLPGPCYRQQRVSTTLSQNNNSNFAWTGATKYHLNGRDSLVNPGVAMATHKDDEERFFPSSGVLMFGKQGAGRDNVDYSSVMLTSEEEIKTTNPVATEQYGVVADNLQQTNTGPIVGNVNSQGALPGMVWQNRDVYLQGPIWAKIPHTDGNFHPSPLMGGFGLKHPPPQILIKNTPVPADPPTTFSQAKLASFITQYSTGQVSVEIEWELQKENSKRWNPEIQYTSNYYKSTNVDFAVNTEGTYSEPRPIGTRYLTRNL

SEQ ID NO: 326 - DNA, 2217 bp, Artificial Sequence
  source: /note="Description of Artificial Sequence: Synthetic polynucleotide"
atggctgctgacggttatcttccagattggctcgaggacaacctctctgagggcattcgcgagtggtgggacctgaaacctggagcccccaagcccaaggccaaccagcagaagcaggacgacggccggggtctggtgcttcttggctacaagtacctcggacccttcaacggactcgacaagggggagcccgtcaatgcggcggacgcagcggccctcgagcacgacaaggcctacgaccagcagctcaaagcgggtgacaatccgtacctgcggtataaccacgccgacgccgagtttcaggagcgtctgcaagaagatacgtcttttgggggcaacctcgggcgagcagtcttccaggccaagaagcgggttctcgaacctctcggtctggttgaggaagctgctaagacggctcctggaaagaagagaccggtagaaccgtcacctcagcgttcccccgactcctccacgggcatcggcaagaaaggccagcagcccgctaaaaagagactgaactttggtcagactggcgactcagagtcagtccccgaccctcaaccaatcggagaaccaccagcaggcccctctggtctgggatctggtacaatggctgcaggcggtggcgctccaatggcagacaataacgaaggcgccgacggagtgggtagttcctcaggaaattggcattgcgattccacatggctgggcgacagagtcatcaccaccagcacccgaacctgggccctgcccacctacaacaaccacctctacaagcaaatatccaatgggacatcgggaggaagcaccaacgacaacacctacttcggctacagcaccccctgggggtattttgacttcaacagattccactgccacttctcaccacgtgactggcagcgactcatcaacaacaactggggattccggccaaaaagactcagcttcaagctcttcaacatccaggtcaaggaggtcacgcagaatgaaggcaccaagaccatcgccaataaccttaccagcacgattcaggtatttacggactcggaataccagctgccgtacgtcctcggctccgcgcaccagggctgcctgcctccgttcccggcggacgtcttcatgattccccagtacggctaccttacactgaacaatggaagtcaagccgtaggccgttcctccttctactgcctggaatattttccatctcaaatgctgcgaactggaaacaattttgaattcagctacaccttcgaggacgtgcctttccacagcggctacgcacacagccagagcttggaccgactgatgaatcctctcatcgaccagtacctgtactacttatccagaactcagtccacaggaggaactcaaggtacccagcaattgttattttctcaagctgggcctgcaaacatgtcggctcaggctaagaactggctacctggaccttgctaccggcagcagcgagtctctacgacactgtcgcaaaacaacaacagcaactttgcttggactggtgccaccaaatatcacctgaacggaagagactctttggtaaatcccggtgtcgccatggcaacccacaaggacgacgaggaacgcttcttcccgtcgagtggagtcctgatgtttggaaaacagggtgctggaagagacaatgtggactacagcagcgttatgctaaccagcgaagaagaaattaaaaccactaaccctgtagccacagaacaatacggtgtggtggctgacaacttgcagcaaaccaatacagggcctattgtgggaaatgtcaacagccaaggagccttacctggcatggtctggcagaaccgagacgtgtacctgcagggtcccatctgggccaagattcctcacacggacggcaacttccacccttcaccgctaatgggaggatttggactgaagcacccacctcctcagatcctgatcaagaacacgccggtacctgcggatcctccaacgacgttcagccaggcgaaattggcttccttcattacgcagtacagcaccggacaggtcagcgtggaaatcgagtgggagctgcagaaggagaacagcaaacgctggaacccagagattcagtacacttcaaactactacaaatctacaaatgtggactttgctgtcaatacagagggaacttattctgagcctcgccccattggtactcgttacctcacccgtaatctgtaa

SEQ ID NO: 327 - protein, 738 aa, Artificial Sequence
  source: /note="Description of Artificial Sequence: Synthetic polypeptide"
MAADGYLPDWLEDNLSEGIREWWDLKPGAPKPKANQQKQDDGRGLVLLGYKYLGPFNGLDKGEPVNAADAAALEHDKAYDQQLKAGDNPYLRYNHADAEFQERLQEDTSFGGNLGRAVFQAKKRVLEPLGLVEEAAKTAPGKKRPVEPSPQRSPDSSTGIGKKGQQPAKKRLNFGQTGDSESVPDPQPIGEPPAGPSGLGSGTMAAGGGAPMADNNEGADGVGSSSGNWHCDSTWLGDRVITTSTRTWALPTYNNHLYKQISNGTSGGSTNDNTYFGYSTPWGYFDFNRFHCHFSPRDWQRLINNNWGFRPKRLSFKLFNIQVKEVTQNEGTKTIANNLTSTIQVFTDSEYQLPYVLGSAHQGCLPPFPADVFMIPQYGYLTLNNGSQAVGRSSFYCLEYFPSQMLRTGNNFEFSYTFEDVPFHSGYAHSQSLDRLMNPLIDQYLYYLSRTQSTGGTQGTQQLLFSQAGPANMSAQAKNWLPGPCYRQQRVSTTLSQNNNSNFAWTGATKYHLNGRDSLVNPGVAMATHKDDEERFFPSSGVLMFGKQGAGRDNVDYSSVMLTSEEEIKTTNPVATEQYGVVADNLQQTNTGPIVGNVNSQGALPGMVWQNRDVYLQGPIWAKIPHTDGNFHPSPLMGGFGLKHPPPQILIKNTPVPADPPTTFSQAKLASFITQYSTGQVSVEIEWELQKENSKRWNPEIQYTSNYYKSTNVDFAVNTEGTYSEPRPIGTRYLTRNL

SEQ ID NO: 328 - protein, 735 aa, Artificial Sequence
  source: /note="Description of Artificial Sequence: Synthetic polypeptide"
MAADGYLPDWLEDTLSEGIRQWWKLKPGPPPPKPAERHKDDSRGLVLPGYKYLGPFNGLDKGEPVNEADAAALEHDKAYDRQLDSGDNPYLKYNHADAEFQERLKEDTSFGGNLGRAVFQAKKRVLEPLGLVEPPVKTAPGKKRPVEHSPAEPDSSSGTGKAGQQPARKRLNFGQTGDADSVPDPQPLGQPPAAPSGLGSTTMATGSGAPMADNNEGADGVGNSSGNWHCDSQWLGDRVITTSTRTWALPTYNNHLYKQISSQSGASNDNHYFGYSTPWGYFDFNRFHCHFSPRDWQRLINNNWGFRPKRLNFKLFNIQVKEVTQNDGTTTIANNLTSTVQVFTDSEYQLPYVLGSAHQGCLPPFPADVFMVPQYGYLTLNNGSQAVGRSSFYCLEYFPSQMLRTGNNFQFSYTFEDVPFHSSYAHSQSLDRLMNPLIDQYLYYLNKTQSNSGTLQQSRLLFSQAGPTSMSLQAKNWLPGPCYRQQRLSKQANDNNNSNFPWTAATKYHLNGRDSLVNPGPAMASHKDDEEKFFPMHGTLIFGKQGTNANDADLDNVMITDEEEIRTTNPVATEQYGYVSNNLQNSNTGPTTGTVNHQGALPGMVWQDRDVYLQGPIWAKIPHTDGHFHPSPLMGGFGLKHPPPQIMIKNTPVPANPPTNFSSAKFASFITQYSTGQVSVEIEWELQKENSKRWNPEIQYTSNYNKSVNVDFTVDTNGVYSEPRPIGTRYLTRNL

SEQ ID NO: 329 - protein, 735 aa, Artificial Sequence
  source: /note="Description of Artificial Sequence: Synthetic polypeptide"
MAADGYLPDWLEDTLSEGIRQWWKLKPGPPPPKPAERHKDDSRGLVLPGYKYLGPFNGLDKGEPVNEADAAALEHDKAYDRQLDSGDNPYLKYNHADAEFQERLKEDTSFGGNLGRAVFQAKKRVLEPLGLVEGPVKTAPGKKRPVEHSPAEPDSSSGTGKAGQQPARKRLNFGQTGDADSVPDPQPLGQPPAAPSGLGSTTMATGSGAPMADNNEGADGVGNSSGNWHCDSQWLGDRVITTSTRTWALPTYNNHLYKQISSQSGASNDNHYFGYSTPWGYFDFNRFHCHFSPRDWQRLINNNWGFRPKRLNFKLFNIQVKEVTQNDGTTTIANNLTSTVQVFTDSEYQLPYVLGSAHQGCLPPFPADVFMVPQYGYLTLNNGSQAVGRSSFYCLEYFPSQMLRTGNNFQFSYTFEDVPFHSSYAHSQSLDRLMNPLIDQYLYYLNKTQSNSGTLQQSRLLFSQAGPTSMSLQAKNWLPGPCYRQQRLSKQANDNNNSNFPWTAATKYHLNGRDSLVNPGPAMASHKDDEEKFFPMHGTLIFGKQGTNANDADLDNVMITDEEEIRTTNPVATEQYGYVSNNLQNSNTGPTTGTVNHQGALPGMVWQDRDVYLQGPIWAKIPHTDGHFHPSPLMGGFGLKHPPPQIMIKNTPVPANPPTNFSSAKFASFITQYSTGQVSVEIEWELQKENSKRWNPEIQYTSNYNKSVNVDFTVDTNGVYSEPRPIGTRYLTRNL

SEQ ID NO: 330 - DNA, 2208 bp, Artificial Sequence
  source: /note="Description of Artificial Sequence: Synthetic polynucleotide"
atggctgccgatggttatcttccagattggctcgaggacactctctctgaaggaataagacagtggtggaagctcaaacctggcccaccaccaccaaagcccgcagagcggcataaggacgacagcaggggtcttgtgcttcctgggtacaagtacctcggacccttcaacggactcgacaagggggagccggtcaacgaggcagacgccgcggccctcgagcacgacaaggcctacgaccggcagctcgacagcggagacaacccgtacctcaagtacaaccacgccgacgcggagtttcaggagcgtcttaaagaagatacgtcttttgggggcaacctcggacgagcagtcttccaggcgaaaaagagggttcttgaacctctgggcctggttgagggacctgttaagacggctccgggaaaaaagaggccggtagagcactctcctgcggagccagactcctcctcgggaaccggaaaagcgggccagcagcctgcaagaaaaagattgaattttggtcagactggagacgcagactccgtacctgacccccagcctctcggacagccaccagcagccccctctggtttgggatctactacaatggctacaggcagtggcgcaccaatggcagacaataacgagggtgccgatggagtgggtaattcctcaggaaattggcattgcgattcccaatggctgggcgacagagtcatcaccaccagcacccgaacctgggccctgcccacctacaacaaccacctctacaagcaaatctcaagccaatcaggagcctcaaacgacaaccactactttggctacagcaccccttgggggtattttgacttcaacagattccactgccacttttcaccacgtgactggcaaagactcatcaacaacaactggggattccgacccaagagactcaacttcaagctctttaacattcaagtcaaagaggtcacgcagaatgacggtacgacgacgattgccaataaccttaccagcacggttcaggtgtttactgactcggagtaccagctcccgtacgtcctcgggtcggcgcatcaaggatgcctcccgccgtttccagcggacgtcttcatggtcccacagtatggatacctcaccctgaacaacgggagtcaggcggtaggacgctcttccttttactgcctggagtactttccttctcagatgcttcgtactggaaacaactttcagttcagctacacctttgaagacgttcctttccacagcagctacgctcacagccagagtctggatcggctgatgaatcctctgatcgaccagtacctgtattatctgaacaaaacacaatcaaatagtggaactcttcagcagtctcggctactgtttagtcaagctggacccaccagcatgtctcttcaagctaaaaactggctacctggaccttgctacagacagcagcgtctgtcaaagcaggcaaacgacaacaacaacagcaactttccctggactgcggctacaaagtatcacctaaatggccgggactcgttggttaatccaggaccagctatggccagtcacaaagacgatgaagaaaagtttttccccatgcatggaaccctgatatttggtaaacaaggaacaaatgctaacgacgcggatttggacaatgtcatgattacagatgaagaagaaatccgcaccaccaatcccgtggctacggagcagtacggatatgtgtcaaataatttgcaaaactcaaatactggtccaactactggaactgtcaatcaccaaggagcgttacctggcatggtgtggcaggatcgagacgtgtacctgcagggacccatttgggccaagattcctcacaccgatggacactttcatccttctccactgatgggaggttttgggctcaaacacccgcctcctcagatcatgatcaaaaacactcccgttccagccaatcctcccacaaacttcagttctgccaagtttgcttctttcatcacacagtattccacggggcaggtcagcgtggagatcgagtgggagctgcagaaagagaacagcaaacgctggaatcccgaaattcagtacacttccaactacaacaaatctgttaatgtggactttactgtggacactaatggcgtgtattcagagcctcgccccattggcaccagatacctgactcgtaatctgtaa

SEQ ID NO: 331 - DNA, 2211 bp, Artificial Sequence; identical to SEQ ID NO: 12
  source: /note="Description of Artificial Sequence: Synthetic polynucleotide"

SEQ ID NO: 332 - DNA, 2208 bp, Artificial Sequence
  source: /note="Description of Artificial Sequence: Synthetic polynucleotide"
atggctgccgatggttatcttccagattggctcgaggacactctctctgaaggaacaagacagtggtggaagctcaaacctggcccaccaccaccaaagcccgcagagcggcataaggacgacagcaggggtcttgtgcttcctgggtacaagtacctcggacccttcaacggactcgacaagggggagccggtcaacgaggcagacgccgcggccctcgagcacgacaaggcctacgaccggcagctcgacagcggagacaacccgtacctcaagtacaaccacgccgacgcggagtttcaggagcgtcttaaagaagatacgtcttttgggggcaacctcggacgagcagtcttccaggcgaaaaagagggttcttgaacctctgggcctggttgaggaacctgttaagacggctccgggaaaaaagaggccggtagagcactctcctgcggagccagactcctcctcgggaaccggaaaagcgggccagcagcctgcaagaaaaagattgaattttggtcagactggagacgcagactccgtacctgacccccagcctctcggacagccaccagcagccccctctggtttgggatctactacaatggctacaggcagtggcgcaccaatggcagacaataacgagggtgccgatggagtgggtaattcctcaggaaattggcattgcgattcccaatggctgggcgacagagtcatcaccaccagcacccgaacctgggccctgcccacctacaacaaccacctctacaagcaaatctcaagccaatcaggagcctcaaacgacaaccactactttggctacagcaccccttgggggtattttgacttcaacagattccactgccacttttcaccacgtgactggcaaagactcatcaacaacaactggggattccgacccaagagactcaacttcaagctctttaacattcaagtcaaagaggtcacgcagaatgacggtacgacgacgattgccaataaccttaccagcacggttcaggtgtttactgactcggagtaccagctcccgtacgtcctcgggtcggcgcatcaaggatgcctcccgccgtttccagcggacgtcttcatggtcccacagtatggatacctcaccctgaacaacgggagtcaggcggtaggacgctcttccttttactgcctggagtactttccttctcagatgcttcgtactggaaacaactttcagttcagctacacctttgaagacgttcctttccacagcagctacgctcacagccagagtctggatcggctgatgaatcctctgatcgaccagtacctgtattatctgaacaaaacacaatcaaatagtggaactcttcagcagtctcggctactgtttagtcaagctggacccaccagcatgtctcttcaagctaaaaactggctacctggaccttgctacagacagcagcgtctgtcaaagcaggcaaacgacaacaacaacagcaactttccctggactgcggctacaaagtaccacctaaatggccgggactcgttggttaatccaggaccagctatggccagtcacaaagacgatgaagaaaagtttttccccatgcatggaaccctgatatttggtaaacaaggaacaaatgctaacgacgcggatttggacaatgtcatgattacagatgaagaagaaatccgcaccaccaatcccgtggctacggagcagtacggatatgtgtcaaataatttgcaaaactcaaatactggtccaactactggaactgtcaatcaccaaggagcgttacctggcatggtgtggcaggatcgagacgtgtacctgcagggacccatttgggccaagattcctcacaccgatggacactttcatccttctccactgatgggaggttttgggctcaaacacccgcctcctcagatcatgatcaaaaacactcccgttccagccaatcctcccacaaacttcagttctgccaagtttgcttctttcatcacacagtattccacggggcaggtcagcgtggagatcgagtgggagctgcagaaagagaacagcaaacgctggaatcccgaaattcagtacacttccaactacaacaaatctgttaatgtggactttactgtggacactaatggcgtgtattcagagcctcgccccattggcaccagatacctgactcgtaatctgtaa

SEQ ID NO: 333 - DNA, 2217 bp, Artificial Sequence
  source: /note="Description of Artificial Sequence: Synthetic polynucleotide"
atggctgctgacggttatcttccagattggctcgaggacaacctctctgagggcattcgcgagtggtgggacctgaaacctggagcccccaagcccaaggccaaccagcagaagcaggacgacggccggggtctggtgcttcctggctacaagtacctcggacccttcaacggactcgacaagggggagcccgtcaacgcggcggacgcagcggccctcgagcacgacaaggcctacgaccagcagctcaaagcgggtgacaatccgtacctgcggtataaccacgccgacgccgagtttcaggagcgtctgcaagaagatacgtcttttgggggcaacctcgggcgagcagtcttccaggccaagaagcgggttctcgaacctctcggtctggttgaggaagctgctaagacggctcctggaaagaagagaccggtagaaccgtcacctcagcgttcccccgactcctccacgggcatcggcaagaaaggccagcagcccgctaaaaagagactgaactttggtcagactggcgactcagagtcagtccccgaccctcaaccaatcggagaaccacctgcaggcccctctggtctgggatctggtacaatggctgcaggcggtggcgctccaatggcagacaataacgaaggcgccgacggagtgggtagttcctcaggaaattggcattgcgattccacatggctgggcgacagagtcatcaccaccagcacccgaacctgggccctgcccacctacaacaaccacctctacaagcaaatatccaatgggacatcgggagggagcaccaacgacaacacctacttcggctacagcaccccctgggggtattttgacttcaacagattccactgccacttctcaccacgtgactggcagcgactcatcaacaacaactggggattccggccaaaaagactcagcttcaagctcttcaacatccaggtcaaggaggtcacgcagaatgaaggcaccaagaccatcgccaataaccttaccagcacgattcaggtatttacggactcggaataccagctgccgtacgtcctcggctccgcgcaccagggctgcctgcctccgttcccggcggacgtcttcatgattccccagtacggctaccttacactgaacaatggaagtcaagccgtaggccgttcctccttctactgcctggaatattttccatctcaaatgctgcgaactggaaacaattttgaattcagctacaccttcgaggacgtgcctttccacagcagctacgcacacagccagagcttggaccgactgatgaatcctctcatcgaccagtacctgtactacttatccagaactcagtccacaggaggaactcaaggtacccagcaattgttattttctcaagctgggcctgcaaacatgtcggctcaggctaagaactggctacctggaccttgctaccggcagcagcgagtctctacgacactgtcgcaaaacaacaacagcaactttgcttggactggtgccaccaaatatcacctgaacggaagagactctttggtaaatcccggtgtcgccatggcaacccacaaggacgacgaggaacgcttcttcccgtcgagtggagtcctgatgtttggaaaacagggtgctggaagagacaatgtggactacagcagcgttatgctaaccagcgaagaagaaattaaaaccactaaccctgtagccacagaacaatacggtgtggtggctgacaacttgcagcaaaccaatacagggcctattgtgggaaatgtcaacagccaaggagccttacctggcatggtctggcagaaccgagacgtgtacctgcagggtcccatctgggccaagattcctcacacggacggcaactgccacccttcaccgctaatgggaggatttggactgaagcacccacctcctcagatcctgatcaagaacacgccggtacctgcggatcctccaacaacgttcagccaggcgaaattggcttccttcattacgcagtacagcaccggacaggtcagcgtggaaatcgagtgggagctgcagaaggagaacagcaaacgctggaacccagagattcagtacacttcaaactactacaaatctacaaatgtggactttgctgtcaatacagagggaacttattctgagcctcgccccattggtactcgttacctcacccgtaatctgtaa

SEQ ID NO: 334 - protein, 735 aa, Artificial Sequence
  source: /note="Description of Artificial Sequence: Synthetic polypeptide"
MAADGYLPDWLEDTLSEGTRQWWKLKPGPPPPKPAERHKDDSRGLVLPGYKYLGPFNGLDKGEPVNEADAAALEHDKAYDRQLDSGDNPYLKYNHADAEFQERLKEDTSFGGNLGRAVFQAKKRVLEPLGLVEEPVKTAPGKKRPVEHSPAEPDSSSGTGKAGQQPARKRLNFGQTGDADSVPDPQPLGQPPAAPSGLGSTTMATGSGAPMADNNEGADGVGNSSGNWHCDSQWLGDRVITTSTRTWALPTYNNHLYKQISSQSGASNDNHYFGYSTPWGYFDFNRFHCHFSPRDWQRLINNNWGFRPKRLNFKLFNIQVKEVTQNDGTTTIANNLTSTVQVFTDSEYQLPYVLGSAHQGCLPPFPADVFMVPQYGYLTLNNGSQAVGRSSFYCLEYFPSQMLRTGNNFQFSYTFEDVPFHSSYAHSQSLDRLMNPLIDQYLYYLNKTQSNSGTLQQSRLLFSQAGPTSMSLQAKNWLPGPCYRQQRLSKQANDNNNSNFPWTAATKYHLNGRDSLVNPGPAMASHKDDEEKFFPMHGTLIFGKQGTNANDADLDNVMITDEEEIRTTNPVATEQYGYVSNNLQNSNTGPTTGTVNHQGALPGMVWQDRDVYLQGPIWAKIPHTDGHFHPSPLMGGFGLKHPPPQIMIKNTPVPANPPTNFSSAKFASFITQYSTGQVSVEIEWELQKENSKRWNPEIQYTSNYNKSVNVDFTVDTNGVYSEPRPIGTRYLTRNL

SEQ ID NO: 335 - DNA, 2208 bp, Artificial Sequence
  source: /note="Description of Artificial Sequence: Synthetic polynucleotide"
atggctgccgatggttatcttccagattggctcgaggacactctctctgaaggaataagacagtggtggaagctcaaacctggcccaccaccaccaaagcccgcagagcggcatcaggacaacagcaggggtcttgtgcttcctgggtacaagtacctcggaccctccaacggactcgacaaaggagagccggtcaacgaggcagacgccgcggccctcgagcacgacaaggcctacgaccggcagctcgacagcggagacaacccgtacctcaagtacaaccacgccgacgcggagtttcaggagcgtcttaaagaagatacgtcttttgggggcaacctcggacgagcagtcttccaggcgaaaaagagggttcttgaacctctgggcctggttgaggaacctgttaagacggctccgggaaaaaagaggccggtagagcactctcctgtggagccagactcctcctcgggaaccggaaaagcgggccatcagcctgcgagaaagagattgaattttggtcagactggagacgcagactccgtacctgacccccagcctctcggacagccaccagcagcccccacaagtttgggatctactacaatggctacaggcagtggcgcaccaatggcagacaataacgagggtgccgatggagtgggtaattcctcaggaaattggcattgcgattcccaatggctgggcgacagagtcatcaccaccagcacccgaacctgggccctgcccacctacaacaaccacctctacaagcaaatctccagccaatcaggagcctcgaacgacaaccactactttggctgcagcaccccctgggggtattttgacttcaacagattccactgtcacttctccccacgtgattggcaaagactcatcaacaacaactggggattccgacccaagagactcaacttcaagctctttaacattcaagtcaaagaggtcacgcagaatgacggtacgacgacgattgccaataaccttaccagcacggttcaggtgtttactgactcggagtacccgctcccgtacgtcctcggctcggcgcatcaaggatgcctcccgccgtttccagcggacgtcttcatggtcccacagtatggatacctcaccctgaacaacgggagtcaggcggtaggacgctcttccttttactgcctggagtactttccttctcagatgctgcgtaccggaaacaactttaccttcagctacacctttgaggacgttcctttccacagcagctacgctcacagccagagtttggaccggctgatgaatcctctgatcgaccagtatctatattatctgaacaggacacaatcaaatagtggaactcttcagcagtctaggctactgtttagccaagctggacccaccagcatgtctcttcaagctaaaaactggctgcctggaccttgctacagacagcagcgtctttcaaagcaggcaaacgacaacaacaacagcaactttccctggactgcggctacaaagtatcatctaaatggccgggactcgttggttaatccaggaccagctatggccagccacaaagacgatgaagaaaagtttttccccatgcatggaaccctgatatttggtaaacaaggaacaaatgctaacgacgcggatttggagcatgttatgattacagatgaagaagaaatcaggaccaccaatcctgtggctacagagcagtacggaaacgtgtcaaataatttgcaaaactcaaatactggtccaactacagaaaatgtcaatcaccagggagcgttacctggtatggtgtggcaggatcgagacgtgtacctgcagggacccatttgggccaagattcctcacaccgacggacactttcacccttctccactgatgggaggttttggactcaaacacccgcctcctcaaatcatgatcaaaaacactcccgttccagccaatcctcccacaaacttcagttctgccaagtttgcttctttcatcacacagtattccacgggccaggtcagcgtggagattgagtgggagctgcagaaggagaacagcaaacgctggaaccccgagatccagtatacttccaactacaacaaatctgttaatgtggactttactgtggacactaatggtgtgtattcagagccttgccccattggcaccagatacctgactcgtaatctgtaa

SEQ ID NO: 336 - protein, 735 aa, Artificial Sequence
  source: /note="Description of Artificial Sequence: Synthetic polypeptide"
MAADGYLPDWLEDTLSEGIRQWWKLKPGPPPPKPAERHQDNSRGLVLPGYKYLGPSNGLDKGEPVNEADAAALEHDKAYDRQLDSGDNPYLKYNHADAEFQERLKEDTSFGGNLGRAVFQAKKRVLEPLGLVEEPVKTAPGKKRPVEHSPVEPDSSSGTGKAGHQPARKRLNFGQTGDADSVPDPQPLGQPPAAPTSLGSTTMATGSGAPMADNNEGADGVGNSSGNWHCDSQWLGDRVITTSTRTWALPTYNNHLYKQISSQSGASNDNHYFGCSTPWGYFDFNRFHCHFSPRDWQRLINNNWGFRPKRLNFKLFNIQVKEVTQNDGTTTIANNLTSTVQVFTDSEYPLPYVLGSAHQGCLPPFPADVFMVPQYGYLTLNNGSQAVGRSSFYCLEYFPSQMLRTGNNFTFSYTFEDVPFHSSYAHSQSLDRLMNPLIDQYLYYLNRTQSNSGTLQQSRLLFSQAGPTSMSLQAKNWLPGPCYRQQRLSKQANDNNNSNFPWTAATKYHLNGRDSLVNPGPAMASHKDDEEKFFPMHGTLIFGKQGTNANDADLEHVMITDEEEIRTTNPVATEQYGNVSNNLQNSNTGPTTENVNHQGALPGMVWQDRDVYLQGPIWAKIPHTDGHFHPSPLMGGFGLKHPPPQIMIKNTPVPANPPTNFSSAKFASFITQYSTGQVSVEIEWELQKENSKRWNPEIQYTSNYNKSVNVDFTVDTNGVYSEPCPIGTRYLTRNL

SEQ ID NO: 337 - DNA, 2214 bp, Artificial Sequence
  source: /note="Description of Artificial Sequence: Synthetic polynucleotide"
atggctgccgatggttatcttccagattggctcgaggacaaccttagtgaaggaattcgcgagtggtgggctttgaaacctggagcccctcaacccaaggcaaatcaacaacatcaagacaacgctcgaggtcttgtgcttccgggttacaaataccttggacccggcaacggactcgacaagggggagccggtcaacgcagcagacgcggcggccctcgagcacgacaaggcctacgaccagcagctgcaggcgggtgacaatccgtacctgcggtataaccacgccgacgccgagtttcaggagcgtctgcaagaagatacgtcttttgggggcaaccttggcagagcagtcttccaggccaaaaagaggatccttgagcctcttggtctggttgaggaagcagctaaaacggctcctggaaagaagaggcctgtagatcagtctcctcaggaaccggactcatcatctggtgttggcaaatcgggcaaacagcctgccagaaaaagactaaatttcggtcagactggcgactcagagtcagtcccagaccctcaacctctcggagaaccaccagcagcccccacaagtttgggatctaatacaatggcttcaggcggtggcgcaccaatggcagacaataacgagggtgccgatggggtgggtagttcctcgggaaattggcattgcgattcccaatggctgggggacagagtcatcaccaccagcacccgaacctgggccctgcccacctacaacaatcacctctacaagcaaatctccaacgggacatcgggaggagccaccaacgacaacacctacttcggctacagcaccccctgggggtattttgactttaacagattccactgccacttttcaccacgtgactggcagcgactcatcaacaacaactggggattccggcccaagagactcagcttcaagctcttcaacatccaggtcaaggaggtcacgcagaatgaaggcaccaagaccatcgccaataacctcaccagcaccatccaggtgtttacggactcggagtaccagctgccgtacgttctcggctctgcgcaccagggctgcctccctccgttcccggcggacgtgttcatgattccgcaatacggctacctgacgctcaacaatggcagccaagccgtgggacgttcatccttttactgcctggaatatttcccttctcagatgctgagaacgggcaacaactttaccttcagctacacctttgaggaagtgcctttccacagcagctacgcgcacagccagagcttggaccggctgatgaatcctctgattgaccagtacctgtactacttgtctcggactcaaacaacaggaggcacggcaaatacgcagactctgggcttcagccaaggtgggcctaatacaatggccaatcaggcaaagaactggctgccaggaccctgttaccgccaacaacgcgtctcaacgacaaccgggcaaaacaacaatagcaactttgcctggactgctgggaccaaataccatctgaatggaagaaattcattggctaatcctggcatcgctatggcaacacacaaagacgacgaggagcgtttttttcccagtaacgggatcctgatttttggcaaacaaaatgctgccagagacaatgcggattacagcgatgtcatgctcaccagcgaggaagaaatcaaaaccactaaccctgtggctacagaggaatacggtatcgtggcagataacttgcagcagcaaaacacggctcctcaaattggaactgtcaacagccagggggccttacccggtatggtctggcagaaccgggacgtgtacctgcagggtcccatctgggccaagattcctcacacggacggcaacttccacccgtctccgctgatgggcggctttggcctgaaacatcctccgcctcagatcctgatcaagaacacgcctgtacctgcggatcctccgaccaccttcaaccagtcaaagctgaactctttcatcacgcaatacagcaccggacaggtcagcgtggagatcgagtgggagctgcagaaggaaaacagcaagcgctggaacccggagatccagtacacttccaactattacaagtctaataatgttgaatttgctgttaatactgaaggtgtatatagtgaaccccgccccattggcaccagatacctgactcgtaatctgtaa

SEQ ID NO: 338 - protein, 737 aa, Artificial Sequence
  source: /note="Description of Artificial Sequence: Synthetic polypeptide"
MAADGYLPDWLEDNLSEGIREWWALKPGAPQPKANQQHQDNARGLVLPGYKYLGPGNGLDKGEPVNAADAAALEHDKAYDQQLQAGDNPYLRYNHADAEFQERLQEDTSFGGNLGRAVFQAKKRILEPLGLVEEAAKTAPGKKRPVDQSPQEPDSSSGVGKSGKQPARKRLNFGQTGDSESVPDPQPLGEPPAAPTSLGSNTMASGGGAPMADNNEGADGVGSSSGNWHCDSQWLGDRVITTSTRTWALPTYNNHLYKQISNGTSGGATNDNTYFGYSTPWGYFDFNRFHCHFSPRDWQRLINNNWGFRPKRLSFKLFNIQVKEVTQNEGTKTIANNLTSTIQVFTDSEYQLPYVLGSAHQGCLPPFPADVFMIPQYGYLTLNNGSQAVGRSSFYCLEYFPSQMLRTGNNFTFSYTFEEVPFHSSYAHSQSLDRLMNPLIDQYLYYLSRTQTTGGTANTQTLGFSQGGPNTMANQAKNWLPGPCYRQQRVSTTTGQNNNSNFAWTAGTKYHLNGRNSLANPGIAMATHKDDEERFFPSNGILIFGKQNAARDNADYSDVMLTSEEEIKTTNPVATEEYGIVADNLQQQNTAPQIGTVNSQGALPGMVWQNRDVYLQGPIWAKIPHTDGNFHPSPLMGGFGLKHPPPQILIKNTPVPADPPTTFNQSKLNSFITQYSTGQVSVEIEWELQKENSKRWNPEIQYTSNYYKSNNVEFAVNTEGVYSEPRPIGTRYLTRNL

SEQ ID NO: 339 - DNA, 2211 bp, Artificial Sequence
  source: /note="Description of Artificial Sequence: Synthetic polynucleotide"
atggctgccgatggttatcttccagattggctcgaggacaacctctctgagggcattcgcgagtggtgggacttgaaacctggagccccgaagcccaaagccaaccagcaaaagcaggacgacggccggggtctggtgcttcctggctacaagtacctcggacccttcaacggactcgacaagggggagcccgtcaacgcggcggacgcagcggccctcgagcacgacaaggcctacgaccagcagctcaaagcgggtgacaatccgtacctgcggtataaccacgccgacgccgagtttcaggagcgtctgcaagaagatacgtcttttgggggcaacctcgggcgagcagtcttccaggccaagaagcgggttctcgaacctctcggtctggttgaggaaggcgctaagacggctcctggaaagaaacgtccggtagagcagtcgccacaagagccagactcctcctcgggcatcggcaagacaggccagcagcccgctaaaaagagactcaattttggtcagactggcgactcagagtcagtccccgacccacaacctctcggagaacctccagcaacccccgctgctgtgggacctactacaatggcttcaggcggtggcgcaccaatggcagacaataacgaaggcgccgacggagtgggtaatgcctcaggaaattggcattgcgattccacatggctgggcgacagagtcatcaccaccagcacccgaacatgggccttgcccacctataacaaccacctctacaagcaaatctccagtgcttcaacgggggccagcaacgacaaccactacttcggctacagcaccccctgggggtattttgatttcaacagattccactgccatttctcaccacgtgactggcagcgactcatcaacaacaattggggattccggcccaagagactcaacttcaagctcttcaacatccaagtcaaggaggtcacgacgaatgatggcgtcacgaccatcgctaataaccttaccagcacggttcaagtcttctcggactcggagtaccagctgccgtacgttctcggctctgcccaccagggctgcctgcctccgttcccggcggacgtgttcatgattccccagtacggctacctaacactcaacaacggtagtcaggccgtgggacgctcctccttctactgcctggaatactttccttcgcagatgctgagaaccggcaacaacttccagtttacttacaccttcgaggacgtgcctttccacagcagctacgcccacagccagagcttggaccggctgatgaatcctctgattgaccagtacctgtactacttgtctcggactcaaacaacaggaggcacggcaaatacgcagactctgggcttcagccaaggtgggcctaatacaatggccaatcaggcaaagaactggctgccaggaccctgttaccgccaacaacgcgtctcaacgacaaccgggcaaaacaacaatagcaattttacctggactggtgcttcaaaatataacctcaatgggcgtgaatccatcatcaaccctggcactgctatggcctcacacaaagacgacgaagacaagttctttcccatgagcggtgtcatgatttttggaaaagagagcgccggagcttcaaacactgcattggacaatgtcatgattacagacgaagaggaaattaaagccactaaccctgtggccaccgaaagatttgggaccgtggcagtcaatttccagagcagcagcacagaccctgcgaccggagatgtgcatgctatgggagcattacctggcatggtgtggcaagatagagacgtgtacctgcagggtcccatttgggccaaaattcctcacacagatggacactttcacccgtctcctcttatgggcggctttggactcaagaacccgcctcctcagatcctcatcaaaaacacgcctgttcctgcgaatcctccggcggagttttcagctacaaagtttgcttcattcatcacccaatactccacaggacaagtgagtgtggaaattgaatgggagctgcagaaagaaaacagcaagcgctggaatcccgaagtgcagtacacatccaattatgcaaaatctgccaacgttgattttactgtggacaacaatggactttatactgagcctcgccccattggcacccgttacctcacccgtcccctgtaa

SEQ ID NO: 340 - protein, 736 aa, Artificial Sequence
  source: /note="Description of Artificial Sequence: Synthetic polypeptide"
MAADGYLPDWLEDNLSEGIREWWDLKPGAPKPKANQQKQDDGRGLVLPGYKYLGPFNGLDKGEPVNAADAAALEHDKAYDQQLKAGDNPYLRYNHADAEFQERLQEDTSFGGNLGRAVFQAKKRVLEPLGLVEEGAKTAPGKKRPVEQSPQEPDSSSGIGKTGQQPAKKRLNFGQTGDSESVPDPQPLGEPPATPAAVGPTTMASGGGAPMADNNEGADGVGNASGNWHCDSTWLGDRVITTSTRTWALPTYNNHLYKQISSASTGASNDNHYFGYSTPWGYFDFNRFHCHFSPRDWQRLINNNWGFRPKRLNFKLFNIQVKEVTTNDGVTTIANNLTSTVQVFSDSEYQLPYVLGSAHQGCLPPFPADVFMIPQYGYLTLNNGSQAVGRSSFYCLEYFPSQMLRTGNNFQFTYTFEDVPFHSSYAHSQSLDRLMNPLIDQYLYYLSRTQTTGGTANTQTLGFSQGGPNTMANQAKNWLPGPCYRQQRVSTTTGQNNNSNFTWTGASKYNLNGRESIINPGTAMASHKDDEDKFFPMSGVMIFGKESAGASNTALDNVMITDEEEIKATNPVATERFGTVAVNFQSSSTDPATGDVHAMGALPGMVWQDRDVYLQGPIWAKIPHTDGHFHPSPLMGGFGLKNPPPQILIKNTPVPANPPAEFSATKFASFITQYSTGQVSVEIEWELQKENSKRWNPEVQYTSNYAKSANVDFTVDNNGLYTEPRPIGTRYLTRPL

SEQ ID NO: 341 - DNA, 2211 bp, Artificial Sequence
  source: /note="Description of Artificial Sequence: Synthetic polynucleotide"
atggctgctgacggttatcttccagattggctcgaggacaacctttctgaaggcattcgagagtggtgggcgctgcaacctggagcccctaaacccaaggcaaatcaacaacatcaggacaacgctcggggtcttgtgcttccgggttacaaatacctcggacccggcaacggactcgacaagggggaacccgtcaacgcagcggacgcggcagccctcgagcacgacaaggcctacgaccagcagctcaaggccggtgacaacccctacctcaagtacaaccacgccgacgccgagttccaggagcggctcaaagaagatacgtcttttgggggcaacctcgggcgagcagtcttccaggccaaaaagaggcttcttgaacctcttggtctggttgaggaagcggctaagacggctcctggaaagaagaggcctgtagatcagtctcctcaggaaccggactcatcatctggtgttggcaaatcgggcaaacagcctgccagaaaaagactaaatttcggtcagactggcgactcagagtcagtcccagaccctcaacctctcggagaaccaccagcagcccccacaagtttgggatctaatacaatggcttcaggcggtggcgcaccaatggcagacaataacgagggtgccgatggagtgggtaattcctcaggaaattggcattgcgattcccaatggctgggcgacagagtcatcaccaccagcaccagaacctgggccctgcccacttacaacaaccatctctacaagcaaatctccagccaatcaggagcttcaaacgacaaccactactttggctacagcaccccttgggggtattttgactttaacagattccactgccacttctcaccacgtgactggcagcgactcattaacaacaactggggattccggcccaagaaactcagcttcaagctcttcaacatccaagttaaagaggtcacgcagaacgatggcacgacgactattgccaataaccttaccagcacggttcaagtgtttacggactcggagtatcagctcccgtacgtgctcgggtcggcgcaccaaggctgtctcccgccgtttccagcggacgtcttcatggtccctcagtatggatacctcaccctgaacaacggaagtcaagcggtgggacgctcatccttttactgcctggagtacttcccttcgcagatgctaaggactggaaataacttccaattcagctataccttcgaggatgtaccttttcacagcagctacgctcacagccagagtttggatcgcttgatgaatcctcttattgatcagtatctgtactacctgaacagaacgcaaggaacaacctctggaacaaccaaccaatcacggctgctttttagccaggctgggcctcagtctatgtctttgcaggccagaaattggctacctgggccctgctaccggcaacagagactttcaaagactgctaacgacaacaacaacagtaactttccttggacagcggccagcaaatatcatctcaatggccgcgactcgctggtgaatccaggaccagctatggccagtcacaaggacgatgaagaaaaatttttccctatgcacggcaatctaatatttggcaaagaagggacaacggcaagtaacgcagaattagataatgtaatgattacggatgaagaagagattcgtaccaccaatcctgtggcaacagagcagtatggaactgtggcaaataacttgcagagctcaaatacagctcccacgactagaactgtcaatgatcagggggccttacctggcatggtgtggcaagatcgtgacgtgtaccttcaaggacctatctgggcaaagattcctcacacggatggacactttcatccttctcctctgatgggaggctttggactgaaacatccgcctcctcaaatcatgatcaaaaatactccggtaccggcaaatcctccgacgactttcagcccggccaagtttgcttcatttatcactcagtactccactggacaggtcagcgtggaaattgagtgggagctacagaaagaaaacagcaaacgttggaatccagagattcagtacacttccaactacaacaagtctgttaatgtggactttactgtagacactaatggtgtttatagtgaacctcgccccattggcacccgttaccttacccgtcccctgtaa

SEQ ID NO: 342 - protein, 736 aa, Artificial Sequence
  source: /note="Description of Artificial Sequence: Synthetic polypeptide"
MAADGYLPDWLEDNLSEGIREWWALQPGAPKPKANQQHQDNARGLVLPGYKYLGPGNGLDKGEPVNAADAAALEHDKAYDQQLKAGDNPYLKYNHADAEFQERLKEDTSFGGNLGRAVFQAKKRLLEPLGLVEEAAKTAPGKKRPVDQSPQEPDSSSGVGKSGKQPARKRLNFGQTGDSESVPDPQPLGEPPAAPTSLGSNTMASGGGAPMADNNEGADGVGNSSGNWHCDSQWLGDRVITTSTRTWALPTYNNHLYKQISSQSGASNDNHYFGYSTPWGYFDFNRFHCHFSPRDWQRLINNNWGFRPKKLSFKLFNIQVKEVTQNDGTTTIANNLTSTVQVFTDSEYQLPYVLGSAHQGCLPPFPADVFMVPQYGYLTLNNGSQAVGRSSFYCLEYFPSQMLRTGNNFQFSYTFEDVPFHSSYAHSQSLDRLMNPLIDQYLYYLNRTQGTTSGTTNQSRLLFSQAGPQSMSLQARNWLPGPCYRQQRLSKTANDNNNSNFPWTAASKYHLNGRDSLVNPGPAMASHKDDEEKFFPMHGNLIFGKEGTTASNAELDNVMITDEEEIRTTNPVATEQYGTVANNLQSSNTAPTTRTVNDQGALPGMVWQDRDVYLQGPIWAKIPHTDGHFHPSPLMGGFGLKHPPPQIMIKNTPVPANPPTTFSPAKFASFITQYSTGQVSVEIEWELQKENSKRWNPEIQYTSNYNKSVNVDFTVDTNGVYSEPRPIGTRYLTRPL

SEQ ID NO: 343 - DNA, 2211 bp, Artificial Sequence
  source: /note="Description of Artificial Sequence: Synthetic polynucleotide"
atggctgccgatggttatcttccagattggctcgaggacaaccttagtgaaggaattcgcgagtggtgggctttgaaacctggagcccctcaacccaaggcaaatcaacaacatcaagacaacgctcgaggtcttgtgcttccgggttacaaataccttggacccggcaacggactcgacaagggggagccggtcaacgcagcagacgcggcggccctcgagcacgacaaggcctacgaccagcagctcaaggccggagacaacccgtacctcaagtacaaccacgccgacgccgagttccaggagcggctcaaagaagatacgtcttttgggggcaacctcgggcgagcagtcttccaggccaaaaagaggcttcttgaacctcttggtctggttgaggaagcggctaagacggctcctggaaagaagagaccggtagagccatcaccccagcgttctccagactcctctacgggcatcggcaagaaaggccaacagcccgctaaaaagagactcaattttggtcagactggcgactcagagtcagtccccgacccacaacctctcggagaacctccagcaacccccgctgctgtgggacctactacaatggcttcaggcggtggcgcaccaatggcagacaataacgagggtgccgatggagtgggtaattcctcaggaaattggcattgcgattcccaatggctgggcgacagagtcatcaccaccagcaccagaacctgggccctgcccacttacaacaaccatctctacaagcaaatctccagccaatcaggagcttcaaacgacaaccactactttggctacagcaccccttgggggtattttgactttaacagattccactgccacttttcaccacgtgactggcaaagactcatcaacaacaactggggattccgacccaagagactcaacttcaagctcttcaacatccaagtcaaggaggtcacgacgaatgatggcgtcacgaccatcgctaataaccttaccagcacggttcaagtcttctcggactcggagtaccagttgccgtacgtcctcggctctgcgcaccagggctgcctccctccgttcccggcggacgtgttcatgattccgcagtacggctacctaacgctcaacaatggcagccaagccgtgggacgttcatccttttactgcctggaatatttcccttctcagatgctgagaacgggcaacaactttaccttcagctacacttttgaggacgttcctttccacagcagctacgctcacagccagagtctggaccgtctcatgaatcctctcatcgaccagtacctgtattacttgagcagaacaaacactccaagtggaaccaccacgcagtcaaggcttcagttttctcaggccggagcgagtgacattcgggaccagtctaggaactggcttcctggaccctgttaccgccagcagcgcgtttctaaaacaaaaacagacaacaacaacagcaattttacctggactggtgcttcaaaatataaccttaatgggcgtgaatctataatcaaccctggcactgctatggcctcacacaaagacgacgaagacaagttctttcccatgagcggtgtcatgatttttggaaaagagagcgccggagcttcaaacactgcattggacaatgtcatgattacagacgaagaggaaattaaagccactaaccctgtggccaccgaaagatttgggaccgtggcagtcaatttccagagcagcagcacagaccctgcgaccggagatgtgcatgttatgggagccttacctggaatggtgtggcaagacagagacgtatacctgcagggtcctatttgggccaaaattcctcacacggatggacactttcacccgtctcctcttatgggcggctttggactcaagaacccgcctcctcagatcctcatcaaaaacacgcctgttcctgcgaatcctccggcggagttttcagctacaaagtttgcttcattcatcacccaatactccacaggacaagtgagtgtggaaattgaatgggagctgcagaaagaaaacagcaagcgctggaatcccgaagtgcagtacacatccaattatgcaaaatctgccaacgttgattttactgtggacaacaatggactttatactgagcctcgccccattggcacccgttaccttacccgtcccctgtaa

SEQ ID NO: 344 - protein, 736 aa, Artificial Sequence
  source: /note="Description of Artificial Sequence: Synthetic polypeptide"
MAADGYLPDWLEDNLSEGIREWWALKPGAPQPKANQQHQDNARGLVLPGYKYLGPGNGLDKGEPVNAADAAALEHDKAYDQQLKAGDNPYLKYNHADAEFQERLKEDTSFGGNLGRAVFQAKKRLLEPLGLVEEAAKTAPGKKRPVEPSPQRSPDSSTGIGKKGQQPAKKRLNFGQTGDSESVPDPQPLGEPPATPAAVGPTTMASGGGAPMADNNEGADGVGNSSGNWHCDSQWLGDRVITTSTRTWALPTYNNHLYKQISSQSGASNDNHYFGYSTPWGYFDFNRFHCHFSPRDWQRLINNNWGFRPKRLNFKLFNIQVKEVTTNDGVTTIANNLTSTVQVFSDSEYQLPYVLGSAHQGCLPPFPADVFMIPQYGYLTLNNGSQAVGRSSFYCLEYFPSQMLRTGNNFTFSYTFEDVPFHSSYAHSQSLDRLMNPLIDQYLYYLSRTNTPSGTTTQSRLQFSQAGASDIRDQSRNWLPGPCYRQQRVSKTKTDNNNSNFTWTGASKYNLNGRESIINPGTAMASHKDDEDKFFPMSGVMIFGKESAGASNTALDNVMITDEEEIKATNPVATERFGTVAVNFQSSSTDPATGDVHVMGALPGMVWQDRDVYLQGPIWAKIPHTDGHFHPSPLMGGFGLKNPPPQILIKNTPVPANPPAEFSATKFASFITQYSTGQVSVEIEWELQKENSKRWNPEVQYTSNYAKSANVDFTVDNNGLYTEPRPIGTRYLTRPL

SEQ ID NO: 345 - DNA, 2211 bp, Artificial Sequence
  source: /note="Description of Artificial Sequence: Synthetic polynucleotide"
atggctgccgatggttatcttccagattggctcgaggacaacctctctgagggcattcgcgagtggtgggacttgaaacctggagcccctaaacccaaggcaaatcaacaacatcaggacaacgctcgaggtcttgtgcttccgggttacaaataccttggacccggcaacggactcgacaagggggagccggtcaacgcagcagacgcggcggccctcgagcacgacaaggcctacgaccagcagctcaaggccggagacaacccgtacctcaagtacaaccacgccgacgccgagttccaggagcggctcaaagaagatacgtcttttgggggcaacctcgggcgagcagtcttccaggccaaaaagaggcttcttgaacctcttggtctggttgaggaagcggctaagacggctcctggaaagaagagaccggtagagccatcaccccagcgttctccagactcctctacgggcatcggcaagaaaggccaacagcccgctaaaaagagactcaattttggtcagactggcgactcagagtcagtccccgacccacaacctctcggagaacctccagcaacccccgctgctgtgggacctactacaatggcttcaggcggtggcgcaccaatggcagacaataacgagggtgccgatggagtgggtaattcctcaggaaattggcattgcgattcccaatggctgggcgacagagtcatcaccaccagcaccagaacctgggccctgcccacttacaacaaccatctctacaagcaaatctccagccaatcaggagcttcaaacgacaaccactactttggctacagcaccccttgggggtattttgactttaacagattccactgccacttttcaccacgtgactggcaaagactcatcaacaacaactggggattccgacccaagagactcaacttcaagctcttcaacatccaagtcaaggaggtcacgacgaatgatggcgtcacgaccatcgctaataaccttaccagcacggttcaagtcttctcggactcggagtaccagttgccgtacgtcctcggctctgcgcaccagggctgcctccctccgttcccggcggacgtgttcatgattccgcagtacggctacctaacgctcaacaatggcagccaagccgtgggacgttcatccttttactgcctggaatatttcccttctcagatgctgagaacgggcaacaactttaccttcagctacacttttgaggacgttcctttccacagcagctacgctcacagccagagtctggaccgtctcatgaatcccctcatcgaccagtacctgtattacttgagcagaacaaacactccaagtggaaccaccacgcagtcaaggcttcagttttctcaggccggagcgagtgacattcgggaccagtctaggaactggcttcctggaccctgttaccggcagcagcgcgtttctaaaacaaaaacagacaacaacaacagcaactttacctggactggtgcttcaaaatataaccttaatgggcgtgaatctataatcaaccctggcactgctatggcctcacacaaagacgacgaagacaagttctttcccatgagcggtgtcatgatttttggaaaggagagcgccggagcttcaaacactgcattggacaatgtcatgatcacagacgaagaggaaatcaaagccactaaccccgtggccaccgaaagatttgggactgtggcagtcaatctccagagcagcagcacagaccctgcgaccggagatgtgcatgttatgggagccttacctggaatggtgtggcaagacagagacgtgtacctgcagggtcctatttgggccaaaattcctcacacggatggacactttcacccgtctcctctcatgggcggctttggacttaagcacccgcctcctcagatcctcatcaaaaacacgcctgttcctgcgaatcctccggcagagttttcggctacaaagtttgcttcattcatcacccagtattccacaggacaagtgagtgtggaaattgaatgggagctgcagaaagaaaacagcaagcgctggaatcccgaagtgcagtacacatccaattatgcaaaatctgccaacgttgattttactgtggacaacaatggactttatactgagcctcgccccattggcacccgttacctcacccgtcccctgtaa

SEQ ID NO: 346 - protein, 736 aa, Artificial Sequence
  source: /note="Description of Artificial Sequence: Synthetic polypeptide"
MAADGYLPDWLEDNLSEGIREWWDLKPGAPKPKANQQHQDNARGLVLPGYKYLGPGNGLDKGEPVNAADAAALEHDKAYDQQLKAGDNPYLKYNHADAEFQERLKEDTSFGGNLGRAVFQAKKRLLEPLGLVEEAAKTAPGKKRPVEPSPQRSPDSSTGIGKKGQQPAKKRLNFGQTGDSESVPDPQPLGEPPATPAAVGPTTMASGGGAPMADNNEGADGVGNSSGNWHCDSQWLGDRVITTSTRTWALPTYNNHLYKQISSQSGASNDNHYFGYSTPWGYFDFNRFHCHFSPRDWQRLINNNWGFRPKRLNFKLFNIQVKEVTTNDGVTTIANNLTSTVQVFSDSEYQLPYVLGSAHQGCLPPFPADVFMIPQYGYLTLNNGSQAVGRSSFYCLEYFPSQMLRTGNNFTFSYTFEDVPFHSSYAHSQSLDRLMNPLIDQYLYYLSRTNTPSGTTTQSRLQFSQAGASDIRDQSRNWLPGPCYRQQRVSKTKTDNNNSNFTWTGASKYNLNGRESIINPGTAMASHKDDEDKFFPMSGVMIFGKESAGASNTALDNVMITDEEEIKATNPVATERFGTVAVNLQSSSTDPATGDVHVMGALPGMVWQDRDVYLQGPIWAKIPHTDGHFHPSPLMGGFGLKHPPPQILIKNTPVPANPPAEFSATKFASFITQYSTGQVSVEIEWELQKENSKRWNPEVQYTSNYAKSANVDFTVDNNGLYTEPRPIGTRYLTRPL

SEQ ID NO: 347 - DNA, 2214 bp, Artificial Sequence
  source: /note="Description of Artificial Sequence: Synthetic polynucleotide"
atggctgccgatggttatcttccagattggctcgaggacaaccttagtgaaggaattcgcgagtggtgggctttgaaacctggagcccctcaacccaaggcaaatcaacaacatcaagacaacgctcgaggtcttgtgcttccgggttacaaataccttggacccggcaacggactcgacaagggggagccggtcaacgcagcagacgcggcggccctcgagcacgacaaggcctacgaccagcagctgcaggcgggtgacaatccgtacctgcggtataaccacgccgacgccgagtttcaggagcgtctgcaagaagatacgtcttttgggggcaaccttggcagagcagtcttccaggccaaaaagaggatccttgagcctcttggtctggttgaggaagcagctaaaacggctcctggaaagaagaggcctgtagatcagtctcctcaggaaccggactcatcatctggtgttggcaaatcgggcaaacagcctgccagaaaaagactaaatttcggtcagactggcgactcagagtcagtcccagaccctcaacctctcggagaaccaccagcagcccccacaagtttgggatctaatacaatggcttcaggcggtggcgcaccaatggcagacaataacgagggtgccgatggggtgggtagttcctcgggaaattggcattgcgattcccaatgactgggggacagagtcatcaccaccagcacccgaacctgggccctgcccacctacaacaatcacctctacaagcaaatctccaacgggacatcgggaggagccaccaacgacaacacctacttcggctacagcaccccctgggggtattttgactttaacagattccactgccacttttcaccacgtgactggcagcgactcatcaacaacaactggggattccggcccaagagactcagcttcaagctcttcaacatccaggtcaaggaggtcacgcagaatgaaggcaccaagaccatcgccaataacctcaccagcaccatccaggtgtttacggactcggagtaccagctgccgtacgttctcggctctgcgcaccagggctgcctccctccgttcccggcggacgtgttcatgattccgcaatacggctacctgacgctcaacaatggcagccaagccgtgggacgttcatccttttactgcctggaatatttcccttctcagatgctgagaacgggcaacaactttaccttcagctacacctttgaggaagtgcctttccacagcagctacgcgcacagccagagcttggaccggctgatgaatcctctgattgaccagtacctgtactacttgtctcggactcaaacaacaggaggcacggcaaatacgcagactctgggcttcagccaaggtgggcctaatacaatggccaatcaggcaaagaactggctgccaggaccctgttaccgccaacaacgcgtctcaacgacaaccgggcaaaacaacaatagcaactttgcctggactgctgggaccaaataccatctgaatggaagaaattcattggctaatcctggcatcgctatggcaacacacaaagacgacgaggagcgtttttttcccagtaacgggatcctgatttttggcaaacaaaatgctgccagagacaatgcggattacagcgatgtcatgctcaccagcgaggaagaaatcaaaaccactaaccctgtggctacagaggaatacggtatcgtggcagataacttgcagcagcaaaacacggctcctcaaattggaactgtcaacagccagggggccttacccggtatggtctggcagaaccgggacgtgtacctgcagggtcccatctgggccaagattcctcacacggacggcaacttccacccgtctccgctgatgggcggctttggcctgaaacatcctccgcctcagatcctgatcaagaacacgcctgtacctgcggatcctccgaccaccttcaaccagtcaaagctgaactctttcatcacgcaatacagcaccggacaggtcagcgtggagatcgagtgggagctgcagaaggaaaacagcaagcgctggaacccggagatccagtacacttccaactattacaagtctaataatgttgaatttgctgttaatactgaaggtgtatatagtgaaccccgccccattggcaccagatacctgactcgtaatctgtaa

SEQ ID NO: 348 - protein, 736 aa, Artificial Sequence
  source: /note="Description of Artificial Sequence: Synthetic polypeptide"
MAADGYLPDWLEDNLSEGIREWWALKPGAPQPKANQQHQDNARGLVLPGYKYLGPGNGLDKGEPVNAADAAALEHDKAYDQQLQAGDNPYLRYNHADAEFQERLQEDTSFGGNLGRAVFQAKKRILEPLGLVEEAAKTAPGKKRPVDQSPQEPDSSSGVGKSGKQPARKRLNFGQTGDSESVPDPQPLGEPPAAPTSLGSNTMASGGGAPMADNNEGADGVGSSSGNWHCDSQLGDRVITTSTRTWALPTYNNHLYKQISNGTSGGATNDNTYFGYSTPWGYFDFNRFHCHFSPRDWQRLINNNWGFRPKRLSFKLFNIQVKEVTQNEGTKTIANNLTSTIQVFTDSEYQLPYVLGSAHQGCLPPFPADVFMIPQYGYLTLNNGSQAVGRSSFYCLEYFPSQMLRTGNNFTFSYTFEEVPFHSSYAHSQSLDRLMNPLIDQYLYYLSRTQTTGGTANTQTLGFSQGGPNTMANQAKNWLPGPCYRQQRVSTTTGQNNNSNFAWTAGTKYHLNGRNSLANPGIAMATHKDDEERFFPSNGILIFGKQNAARDNADYSDVMLTSEEEIKTTNPVATEEYGIVADNLQQQNTAPQIGTVNSQGALPGMVWQNRDVYLQGPIWAKIPHTDGNFHPSPLMGGFGLKHPPPQILIKNTPVPADPPTTFNQSKLNSFITQYSTGQVSVEIEWELQKENSKRWNPEIQYTSNYYKSNNVEFAVNTEGVYSEPRPIGTRYLTRNL

SEQ ID NO: 349 - DNA, 2214 bp, Artificial Sequence
  source: /note="Description of Artificial Sequence: Synthetic polynucleotide"
atggctgccgatggttatcttccagattggctcgaggacaaccttagtgaaggaattcgcgagtggtgggctttgaaacctggagcccctcaacccaaggcaaatcaacaacatcaagacaacgctcgaggtcttgtgcttccgggttacaaataccttggacccggcaacggactcgacaagggggagccggtcaacgcagcagacgcggcggccctcgagcacgacaaggcctacgaccagcagctgcaggcgggtgacaatccgtacctgcggtataaccacgccgacgccgagtttcaggagcgtctgcaagaagatacgtcttttgggggcaaccttggcagagcagtcttccaggccaaaaagaggatccttgagcctcttggtctggttgaggaagcagctaaaacggctcctggaaagaagaggcctgtagatcagtctcctcaggaaccggactcatcatctggtgttggcaaatcgggcaaacagcctgccagaaaaagactaaatttcggtcagactggcgactcagagtcagtcccagaccctcaacctctcggagaaccaccagcagcccccacaagtttgggatctaatacaatggcttcaggcggtggcgcaccaatggcagacaataacgagggtgccgatggggtgggtagttcctcgggaaattggcattgcgattcccaatggctgggggacagagtcatcaccaccagcacccgaacctgggccctgcccacctacaacaatcacctctacaagcaaatctccaacgggacatcgggaggagccaccaacgacaacacctacttcggctacagcaccccctgggggtattttgactttaacagattccactgccacttttcaccacgtgactggcagcgactcatcaacaacaactggggattccggcccaagagactcagcttcaagctcttcaacatccaggtcaaggaggtcacgcagaatgaaggcaccaagaccatcgccaataacctcaccagcaccatccaggtgtttacggactcggagtaccagctgccgtacgttctcggctctgcgcaccagggctgcctccctccgttcccggcggacgtgttcatgattccgcaatacggctacctgacgctcaacaatggcagccaagccgtgggacgttcatccttttactgcctggaatatttcccttctcagatgctgagaacgggcaacaactttaccttcagctacacctttgaggaagtgccttttcacagcagctacgcgcacagccagagcttggaccggctgatgaatcctctgattgaccagtacctgtactacttgtctcggactcaaacaacaggaggcacggcaaatacgcagactctgggcttcagccaaggtgggcctaatacaatggccaatcaggcaaagaactggctgccaggaccctgttaccgccaacaacgcgtctcaacgacaaccgggcaaaacaacaatagcaactttgcctggactgctgggaccaaataccatctgaatggaagaaattcattggctaatcctggcatcgctatggcaacacacaaagacgacgaggagcgtttttttcccagtaacgggatcctgatttttggcaaacaaaatgctgccagagacaatgcggattacagcgatgtcatgctcaccagcgaggaagaaatcaaaaccactaaccctgtggctacagaggaatacggtatcgtggcagataacttgcagcagcaaaacacggctcctcaaattggaactgtcaacagccagggggccttacccggtatggtctggcagaaccgggacgtgtacctgcagggtcccatctgggccaagattcctcacacggacggcaacttccacccgtctccgctgatgggcggctttggcctgaaacatcctccgcctcagatcctgatcaagaacacgcctgtacctgcggatcctccgaccaccttcaaccagtcaaagctgaactctttcatcacgcaatacagcaccggacaggtcagcgtggagatcgagtgggagctgcagaaggaaaacagcaagcgctggaacccggagatccagtacacttccaactattacaagtctaataatgttgaatttgctgttaatactgaaggtgtatatagtgaaccccgccccattggcaccagatacctgactcgtaatctgtaa

SEQ ID NO: 350 - protein, 737 aa, Artificial Sequence; identical to SEQ ID NO: 338
  source: /note="Description of Artificial Sequence: Synthetic polypeptide"

SEQ ID NO: 351 - DNA, 2211 bp, Artificial Sequence
  source: /note="Description of Artificial Sequence: Synthetic polynucleotide"
atggctgccgatggttatcttccagattggctcgaggacaacctctctgagggcattcgcgagtggtgggacttgaaacctggagcccctaaacccaaggcaaatcaacaacatcaggacaacgctcgaggtcttgtgcttccgggttacaaataccttggacccggcaacggactcgacaagggggagccggtcaacgcagcagacgcggcggccctcgagcacgacaaggcctacgaccagcagctcaaggccggagacaacccgtacctcaagtacaaccacgccgacgccgagttccaggagcggctcaaagaagatacgtcttttgggggcaacctcgggcgagcagtcttccaggccaaaaagaggcttcttgaacctcttggtctggttgaggaagcggctaagacggctcctggaaagaagagaccggtagagccatcaccccagcgttctccagactcctctacgggcatcggcaagaaaggccaacagcccgctaaaaagagactcaattttggtcagactggcgactcagagtcagtccccgacccacaacctctcggagaacctccagcaacccccgctgctgtgggacctactacaatggcttcaggcggtggcgcaccaatggcagacaataacgagggtgccgatggagtgggtaattcctcaggaaattggcattgcgattcccaatggctgggcgacagagtcatcaccaccagcaccagaacctgggccctgcccacttacaacaaccatctctacaagcaaatctccagccaatcaggagcttcaaacgacaaccactactttggctacagcaccccttgggggtattttgactttaacagattccactgccacttttcaccacgtgactggcaaagactcatcaacaacaactggggattccgacccaagagactcaacttcaagctcttcaacatccaagtcaaggaggtcacgacgaatgatggcgtcacgaccatcgctaataaccttaccagcacggttcaagtcttctcggactcggagtaccagttgccgtacgtcctcggctctgcgcaccagggctgcctccctccgttcccggcggacgtgttcatgattccgcagtacggctacctaacgctcaacaatggcagccaagccgtgggacgttcatccttttactgcctggaatatttcccttctcagatgctgagaacgggcaacaactttaccttcagctacacttttgaggacgttcctttccacagcagctacgctcacagccagagtctggaccgtctcatgaatcctctcatcgaccagtacctgtattacttgagcagaacaaacactccaagtggaaccaccacgcagtcaaggcttcagttttctcaggccggagcgagtgacattcgggaccagtctaggaactggcttcctggaccctgttaccgccagcagcgcgtttctaaaacaaaaacagacaacaacaacagcaattttacctggactggtgcttcaaaatataaccttaatgggcgtgaatctataatcaaccctggcactgctatggcctcacacaaagacgacgaagacaagttctttcccatgagcggtgtcatgatttttggaaaagagagcgccggagcttcaaacactgcattggacaatgtcatgattacagacgaagaggaaattaaagccactaaccctgtggccaccgaaagatttgggaccgtggcagtcaatttccagagcagcagcacagaccctgcgaccggagatgtgcatgctatgggagcattacctggcatggtgtggcaagatagagacgtgtacctgcagggtcccatttgggccaaaattcctcacacagatggacactttcacccgtctcctcttatgggcggctttggactcaagaacccgcctcctcagatcctcatcaaaaacacgcctgttcctgcgaatcctccggcggagttttcagctacaaagtttgcttcattcatcacccaatactccacaggacaagtgagtgtggaaattgaatgggagctgcagaaagaaaacagcaagcgctggaatcccgaagtgcagtacacatccaattatgcaaaatctgccaacgttgattttactgtggacaacaatggactttatactgagcctcgccccattggcacccgttaccttacccgtcccctgtaa

SEQ ID NO: 352 - protein, 736 aa, Artificial Sequence
  source: /note="Description of Artificial Sequence: Synthetic polypeptide"
MAADGYLPDWLEDNLSEGIREWWDLKPGAPKPKANQQHQDNARGLVLPGYKYLGPGNGLDKGEPVNAADAAALEHDKAYDQQLKAGDNPYLKYNHADAEFQERLKEDTSFGGNLGRAVFQAKKRLLEPLGLVEEAAKTAPGKKRPVEPSPQRSPDSSTGIGKKGQQPAKKRLNFGQTGDSESVPDPQPLGEPPATPAAVGPTTMASGGGAPMADNNEGADGVGNSSGNWHCDSQWLGDRVITTSTRTWALPTYNNHLYKQISSQSGASNDNHYFGYSTPWGYFDFNRFHCHFSPRDWQRLINNNWGFRPKRLNFKLFNIQVKEVTTNDGVTTIANNLTSTVQVFSDSEYQLPYVLGSAHQGCLPPFPADVFMIPQYGYLTLNNGSQAVGRSSFYCLEYFPSQMLRTGNNFTFSYTFEDVPFHSSYAHSQSLDRLMNPLIDQYLYYLSRTNTPSGTTTQSRLQFSQAGASDIRDQSRNWLPGPCYRQQRVSKTKTDNNNSNFTWTGASKYNLNGRESIINPGTAMASHKDDEDKFFPMSGVMIFGKESAGASNTALDNVMITDEEEIKATNPVATERFGTVAVNFQSSSTDPATGDVHAMGALPGMVWQDRDVYLQGPIWAKIPHTDGHFHPSPLMGGFGLKNPPPQILIKNTPVPANPPAEFSATKFASFITQYSTGQVSVEIEWELQKENSKRWNPEVQYTSNYAKSANVDFTVDNNGLYTEPRPIGTRYLTRPL

SEQ ID NO: 353 - DNA, 2211 bp, Artificial Sequence
  source: /note="Description of Artificial Sequence: Synthetic polynucleotide"
atggctgccgatggttatcttccagattggctcgaggacaaccttagtgaaggaattcgcgagtggtgggcgctgaaacctggagccccgaagcccaaagccaaccagcaaaagcaggacgacggccggggtctggtgcttccgggttacaaatacctcggacccggtaacggactcgacaaaggagagccggtcaacgaggcggacgcggcagccctcgagcacgacaaggcctacgaccagcagctcaaagcgggtgacaatccgtacctgcggtataaccacgccgacgccgagtttcaggagcgtctgcaagaagatacgtcttttgggggcaacctcgggcgagcagtcttccaggccaagaagcgggttctcgaacctctcggtctggttgaggaaggcgctaagacggctcccggaaagaaacgtccggtagagcagtcgccacaagagccagactcctctacgggcatcggcaagaaaggccaacagcccgccagaaaaagactcaatttcggtcagactggcgactcagagtcagttccagaccctcaacctctcggagaacctccagcagcgccctctggtgtgggacctactacaatggcttcaggcggtggcgcaccaatggcagacaataacgaaggcgccgacggagtgggtaatgcctcaggaaattggcattgcgattccacatggctgggcgacagagtcatcaccaccagcacccgaacatgggccttgcccacctataacaaccacctctacaagcaaatctccagtgcttcaacgggggccagcaacgacaacacctacttcggctacagcaccccctgggggtattttgatttcaacagattccactgccatttctcaccacgtgactggcagcgactcatcaacaacaattggggattccggcccaagagactcaacttcaaactcttcaacatccaagtcaaggaggtcacgacgaatgatggcgtcacgaccatcgctaataaccttaccagcacggttcaagtcttctcggactcggagtaccagttgccgtacgtcctcggctctgcgcaccagggctgcctccctccgttcccggcggacgtgttcatgattccgcagtacggctacctaacgctcaacaatggcagccaggcagtgggacggtcatccttttactgcctggaatatttcccatcgcagatgctgagaacgggcaataactttaccttcagctacaccttcgaggacgtgcctttccacagcagctacgcgcacagccagagcctggaccggctgatgaatcctctcatcgaccagtacctgtattacctgaacagaactcagaatcagtccggaagtgcccaaaacaaggacttgctgtttagccgggggtctccagctggcatgtctgttcagcccaaaaactggctacctggaccctgttatcggcagcagcgcgtttctaaaacaaaaacagacaacaacaacagcaattttacctggactggtgcttcaaaatataacctcaatgggcgtgaatccatcatcaaccctggcactgctatggcctcacacaaagacgacgaagacaagttctttcccatgagcggtgtcatgatttttggaaaagagagcgccggagcttcaaacactgcattggacaatgtcatgattacagacgaagaggaaattaaagccactaaccctgtggccaccgaaagatttgggaccgtggcagtcaatttccagagcagcagcacagaccctgcgaccggagatgtgcatgttatgggagccttacctggaatggtgtggcaagacagagacgtatacctgcagggtcctatttgggccaaaattcctcacacagatggacactttcacccgtctcctcttatgggcggctttggactcaagaacccgcctcctcagatcctcatcaaaaacacgcctgttcctgcgaatcctccggcagagttttcggctacaaagtttgcttcattcatcacccagtattccacaggacaagtgagcgtggagattgaatgggagctgcagaaagaaaacagcaaacgctggaatcccgaagtgcagtatacatctaactatgcaaaatctgccaacgttgatttcactgtggacaacaatggactttatactgagcctcgccccattggcacccgttacctcacccgtcccctgtaa

SEQ ID NO: 354 - protein, 736 aa, Artificial Sequence
  source: /note="Description of Artificial Sequence: Synthetic polypeptide"
MAADGYLPDWLEDNLSEGIREWWALKPGAPKPKANQQKQDDGRGLVLPGYKYLGPGNGLDKGEPVNEADAAALEHDKAYDQQLKAGDNPYLRYNHADAEFQERLQEDTSFGGNLGRAVFQAKKRVLEPLGLVEEGAKTAPGKKRPVEQSPQEPDSSTGIGKKGQQPARKRLNFGQTGDSESVPDPQPLGEPPAAPSGVGPTTMASGGGAPMADNNEGADGVGNASGNWHCDSTWLGDRVITTSTRTWALPTYNNHLYKQISSASTGASNDNTYFGYSTPWGYFDFNRFHCHFSPRDWQRLINNNWGFRPKRLNFKLFNIQVKEVTTNDGVTTIANNLTSTVQVFSDSEYQLPYVLGSAHQGCLPPFPADVFMIPQYGYLTLNNGSQAVGRSSFYCLEYFPSQMLRTGNNFTFSYTFEDVPFHSSYAHSQSLDRLMNPLIDQYLYYLNRTQNQSGSAQNKDLLFSRGSPAGMSVQPKNWLPGPCYRQQRVSKTKTDNNNSNFTWTGASKYNLNGRESIINPGTAMASHKDDEDKFFPMSGVMIFGKESAGASNTALDNVMITDEEEIKATNPVATERFGTVAVNFQSSSTDPATGDVHVMGALPGMVWQDRDVYLQGPIWAKIPHTDGHFHPSPLMGGFGLKNPPPQILIKNTPVPANPPAEFSATKFASFITQYSTGQVSVEIEWELQKENSKRWNPEVQYTSNYAKSANVDFTVDNNGLYTEPRPIGTRYLTRPL

SEQ ID NO: 355 - DNA, 2205 bp, Artificial Sequence
  source: /note="Description of Artificial Sequence: Synthetic polynucleotide"
atggctgctgacggttatcttccagattggctcgaggacaacctttctgaaggcattcgtgagtggtgggctctgaaacctggagtccctcaacccaaagcgaaccaacaacaccaggacaaccgtcggggtcttgtgcttccgggttacaaatacctcggacccggtaacggactcgacaaaggagagccggtcaacgaggcggacgcggcagccctcgaacacgacaaggcctacgaccagcagctcaaggccggagacaacccgtacctcaagtacaaccacgccgacgccgagttccaggagcggctcaaagaagatacgtcttttgggggcaacctcgggcgagcagtcttccaggccaaaaagaggcttcttgaacctcttggtctggttgaggaagcggctaagacggctcctggaaagaagaggcctgtagagcagtctcctcaggaaccggactcctccgcgggtattggcaaatcgggtgcacagcccgctaaaaagagactcaatttcggtcagactggcgacacagagtcagtcccagaccctcaaccaatcggagaacctcccgcagccccctcaggtgtgggatctcttacaatggcttcaggtggtggcgcaccagtggcagacaataacgaaggtgccgatggagtgggtagttcctcgggaaattggcattgcgattcccaatggctgggggacagagtcatcaccaccagcacccgaacctgggccctgcccacctacaacaaccacctctacaaacaaatttccagccaatcaggagcctcgaacgacaatcactactttggctacagcaccccttgggggtattttgacttcaacagattccactgccacttttcaccacgtgactggcagcgactcatcaacaacaactggggattccggcccaagagactcagcttcaagctcttcaacatccaggtcaaagaggttacggacaacaatggagtcaagaccatcgccaataaccttaccagcacggtccaggtcttcacggactcagactatcagctcccgtacgtgctcgggtcggctcacgagggctgcctcccgccgttcccagcggacgttttcatgattcctcagtacgggtatctgacgcttaatgatggaagccaggccgtgggtcgttcgtccttttactgcctggaatatttcccgtcgcaaatgctaagaacgggtaacaacttccagttcagctacgagtttgagaacgtacctttccatagcagctacgctcacagccaaagcctggaccgactaatgaatccactcatcgaccaatacttgtactatctctcaaagactattaacggttctggacagaatcaacaaacgctaaaattcagtgtggccggacccagcaacatggctgtccagggaagaaactacatacctggacccagctaccgacaacaacgtgtctcaaccactgtgactcaaaacaacaacagcgaatttgcttggcctggagcttcttcttgggctctcaatggacgtaatagcttgatgaatcctggacctgctatggccagccacaaagaaggagaggaccgtttctttcctttgtctggatctttaatttttggcaaacaaggaactggaagagacaacgtggatgcggacaaagtcatgataaccaacgaagaagaaattaaaactactaacccggtagcaacggagtcctatggacaagtggccacaaaccaccagagtgcccaagcacaggcgcagaccggctgggttcaaaaccaaggaatacttccgggtatggtttggcaggacagagatgtgtacctgcaaggacccatctgggccaagattcctcacacggacggcaacttccacccgtctccgctgatgggcggctttggcctgaaacatcctccgcctcagatcctgatcaagaacacgcctgtacctgcggatcctccgaccaccttcaaccagtcaaagctgaactctttcatcacgcaatacagcaccggacaggtcagcgtggaaattgaatgggagctgcagaaggaaaacagcaagcgctggaatcccgaagtgcagtatacatctaactatgcaaaatctgccaacgttgatttcactgtggacaacaatggactttatactgagcctcgccccattggcacccgttacctcacccgtcccctgtaa

SEQ ID NO: 356 - protein, 734 aa, Artificial Sequence
  source: /note="Description of Artificial Sequence: Synthetic polypeptide"
MAADGYLPDWLEDNLSEGIREWWALKPGVPQPKANQQHQDNRRGLVLPGYKYLGPGNGLDKGEPVNEADAAALEHDKAYDQQLKAGDNPYLKYNHADAEFQERLKEDTSFGGNLGRAVFQAKKRLLEPLGLVEEAAKTAPGKKRPVEQSPQEPDSSAGIGKSGAQPAKKRLNFGQTGDTESVPDPQPIGEPPAAPSGVGSLTMASGGGAPVADNNEGADGVGSSSGNWHCDSQWLGDRVITTSTRTWALPTYNNHLYKQISSQSGASNDNHYFGYSTPWGYFDFNRFHCHFSPRDWQRLINNNWGFRPKRLSFKLFNIQVKEVTDNNGVKTIANNLTSTVQVFTDSDYQLPYVLGSAHEGCLPPFPADVFMIPQYGYLTLNDGSQAVGRSSFYCLEYFPSQMLRTGNNFQFSYEFENVPFHSSYAHSQSLDRLMNPLIDQYLYYLSKTINGSGQNQQTLKFSVAGPSNMAVQGRNYIPGPSYRQQRVSTTVTQNNNSEFAWPGASSWALNGRNSLMNPGPAMASHKEGEDRFFPLSGSLIFGKQGTGRDNVDADKVMITNEEEIKTTNPVATESYGQVATNHQSAQAQAQTGWVQNQGILPGMVWQDRDVYLQGPIWAKIPHTDGNFHPSPLMGGFGLKHPPPQILIKNTPVPADPPTTFNQSKLNSFITQYSTGQVSVEIEWELQKENSKRWNPEVQYTSNYAKSANVDFTVDNNGLYTEPRPIGTRYLTRPL

SEQ ID NO: 357 - DNA, 2211 bp, Artificial Sequence
  source: /note="Description of Artificial Sequence: Synthetic polynucleotide"
atggctgccgatggttatcttccagattggctcgaggacaacctctctgagggcattcgcgagtggtgggcgctgaaacctggagccccgaagcccaaagccaaccagcaaaagcaggacgacggccggggtctggtgcttcctggctacaagtacctcggacccttcaacggactcgacaagggggagcccgtcaacgcggcggacgcagcggccctcgagcacgacaaggcctacgaccagcagctgcaggcgggtgacaatccgtacctgcggtataaccacgccgacgccgagtttcaggagcgtctgcaagaagatacgtcttttgggggcaacctcgggcgagcagtcttccaggccaagaagtgggttctcgaacctctcggtctggttgaggaaggcgctaagacggctcctggaaagaaacgtccggtagagcagtcgccacaagagccagactcctcctcgggcatcggcaagacaggccagcagcccgctaaaaagagactcaattttggtcagactggcgactcagagtcagtccccgacccacaacctctcggagaacctccagcaacccccgctgctgtgggacctactacaatggcttcaggcggtggcgcaccaatggcagacaataacgaaggcgccgacggagtgggtaatgcctcaggaaattggcattgcgattccacatggctgggcgacagagtcatcaccaccagcacccgcacctgggccttgcccacctacaataaccacctctacaagcaaatctccagtgcttcaacgggggccagcaacgacaaccactacttcggctacagcaccccctgggggtattttgatttcaacagattccactgccatttctcaccacgtgactggcagcgactcatcaacaacaattggggattccggcccaagagactcaacttcaagctcttcaacatccaagtcaaggaggtcacgacgaatgatggcgtcacaaccatcgctaataaccttaccagcacggttcaagtcttctcggactcggagtaccagcttccgtacgtcctcggctctgcgcaccagggctgcctccctccgttcccggcggacgtgttcatgattccgcaatacggctacctgacgctcaacaatggcagccaagccgtgggacgttcatccttttactgcctggaatatttcccttctcagatgctgagaacgggcaacaactttaccttcagctacacctttgaggaagtgcctttccacagcagctacgcgcacagccagagcctggaccggctgatgaatcctctcatcgaccaatacctgtattacctgaacagaactcaaaatcagtccggaagtgcccaaaacaaggacttgctgtttagccgtgggtctccagctggcatgtctgttcagcccaaaaactggctacctggaccctgttatcggcagcagcgcgtttctaaaacaaaaacagacaacaacaacagcaattttacctggactggtgcttcaaaatataacctcaatgggcgtgaatccatcatcaaccctggcactgctatggcctcacacaaagacgacgaagacaagttctttcccatgagcggtgtcatgatttttggaaaggagagcgccggagcttcaaacactgcattggacaatgtcatgatcaccgacgaagaggaaatcaaagccactaaccccgtggccaccgaaagatttgggactgtggcagtcaatctccagagcagcagcacagaccctgcgaccggagatgtgcatgttatgggagccttacctggcatggtgtggcaagatagagacgtgtacctgcagggtcccatttgggccaaaattcctcacacagatggacactttcacccgtctcctcttatgggcggctttggactcaagaacccgcctcctcagatcctcatcaaaaacacgcctgttcctgcgaatcctccggcggagttttcagctacaaagtttgcttcattcatcacccaatactccacaggacaagtgagtgtggaaattgaatgggagctgcagaaagaaaacagcaagcgctggaatcccgaagtgcagtacacatccaattatgcaaaatctgccaacgttgattttactgtggacaacaatggactttatactgagcctcgccccattggcacccgttacctcacccgtcccctgtaa

SEQ ID NO: 358 - protein, 736 aa, Artificial Sequence
  source: /note="Description of Artificial Sequence: Synthetic polypeptide"
MAADGYLPDWLEDNLSEGIREWWALKPGAPKPKANQQKQDDGRGLVLPGYKYLGPFNGLDKGEPVNAADAAALEHDKAYDQQLQAGDNPYLRYNHADAEFQERLQEDTSFGGNLGRAVFQAKKWVLEPLGLVEEGAKTAPGKKRPVEQSPQEPDSSSGIGKTGQQPAKKRLNFGQTGDSESVPDPQPLGEPPATPAAVGPTTMASGGGAPMADNNEGADGVGNASGNWHCDSTWLGDRVITTSTRTWALPTYNNHLYKQISSASTGASNDNHYFGYSTPWGYFDFNRFHCHFSPRDWQRLINNNWGFRPKRLNFKLFNIQVKEVTTNDGVTTIANNLTSTVQVFSDSEYQLPYVLGSAHQGCLPPFPADVFMIPQYGYLTLNNGSQAVGRSSFYCLEYFPSQMLRTGNNFTFSYTFEEVPFHSSYAHSQSLDRLMNPLIDQYLYYLNRTQNQSGSAQNKDLLFSRGSPAGMSVQPKNWLPGPCYRQQRVSKTKTDNNNSNFTWTGASKYNLNGRESIINPGTAMASHKDDEDKFFPMSGVMIFGKESAGASNTALDNVMITDEEEIKATNPVATERFGTVAVNLQSSSTDPATGDVHVMGALPGMVWQDRDVYLQGPIWAKIPHTDGHFHPSPLMGGFGLKNPPPQILIKNTPVPANPPAEFSATKFASFITQYSTGQVSVEIEWELQKENSKRWNPEVQYTSNYAKSANVDFTVDNNGLYTEPRPIGTRYLTRPL

SEQ ID NO: 359 - DNA, 2214 bp, Artificial Sequence
  source: /note="Description of Artificial Sequence: Synthetic polynucleotide"
atggctgccgatggttatcttccagattggctcgaggacaaccttagtgaaggaattcgcgagtggtgggctttgaaacctggagcccctcaacccaaggcaaatcaacaacatcaagacaacgctcgaggtcttgtgcttccgggttacaaataccttggacccggcaacggactcgacaagggggagccggtcaacgcagcagacgcggcggccctcgagcacgacaaggcctacgaccagcagctgcaggcgggtgacaatccgtacctgcggtataaccacgccgacgccgagtttcaggagcgtctgcaagaagatacgtcttttgggggcaaccttggcagagcagtcttccaggccaaaaagaggatccttgagcctcttggtctggttgaggaagcagctaaaacggctcctggaaagaagaggcctgtagatcagtctcctcaggaaccggactcatcatctggtgttggcaaatcgggcaaacagcctgccagaaaaagactaaatttcggtcagactggcgactcagagtcagtcccagaccctcaacctctcggagaaccaccagcagcccccacaagtttgggatctaatacaatggcttcaggcggtggcgcaccaatggcagacaataacgagggtgccgatggggtgggtagttcctcgggaaattggcattgcgattcccaatggctgggggacagagtcatcaccaccagcacccgaacctgggccctgcccacctacaacaatcacctctacaagcaaatctccaacgggacatcgggaggagccaccaacgacaacacctacttcggctacagcaccccctgggggtattttgactttaacagattccactgccacttttcaccacgtgactggcagcgactcatcaacaacaactggggattccggcccaagagactcagcttcaagctcttcaacatccaggtcaaggaggtcacgcagaatgaaggcaccaagaccatcgccaataacctcaccagcaccatccaggtgtttacggactcggagtaccagctgccgtacgttctcggctcggcgcaccagggctgcctccctccgttcccggcggacgtcttcatggtgccacagtatggatacctgacgctcaacaatggcagccaagccgtgggacgttcatccttttactgcctggaatatttcccttctcagatgctgagaacgggcaacaactttaccttcagctacacctttgaggaagtgcctttccacagcagctacgcgcacagccagagcttggaccggctgatgaatcctctgattgaccagtacctgtactacttgtctcggactcaaacaacaggaggcacggcaaatacgcagactctgggcttcagccaaggtgggcctaatacaatggccaatcaggcaaagaactggctgccaggaccctgttaccgccaacaacgcgtctcaacgacaaccgggcaaaacaacaatagcaactttgcctggactgctgggaccaaataccatctgaatggaagaaattcattggctaatcctggcatcgctatggcaacacacaaagacgacgaggagcgtttttttcccagtaacgggatcctgatttttggcaaacaaaatgctgccagagacaatgcggattacagcgatgtcatgctcaccagcgaggaagaaatcaaaaccactaaccctgtggctacagaggaatacggtatcgtggcagataacttgcagcagcaaaacacggctcctcaaattggaactgtcaacagccagggggacttacccggtatggtctggcagaaccgggacgtgtacctgcagggtcccatctgggccaagattcctcacacggacggcaacttccacccgtctccgctgatgggcggctttggcctgaaacatcctccgcctcagatcctgatcaagaacacgcctgtacctgcggatcctccgaccaccttcaaccagtcaaagctgaactctttcatcacgcaatacagcaccggacaggtcagcgtggagatcgagtgggagctgcagaaggaaaacagcaagcgctggaacccggagatccagtacacttccaactattacaagtctaataatgttgaatttgctgttaatactgaaggtgtatatagtgaaccccgccccattggcaccagatacctgactcgtaatctgtaa

SEQ ID NO: 360 - protein, 737 aa, Artificial Sequence
  source: /note="Description of Artificial Sequence: Synthetic polypeptide"
MAADGYLPDWLEDNLSEGIREWWALKPGAPQPKANQQHQDNARGLVLPGYKYLGPGNGLDKGEPVNAADAAALEHDKAYDQQLQAGDNPYLRYNHADAEFQERLQEDTSFGGNLGRAVFQAKKRILEPLGLVEEAAKTAPGKKRPVDQSPQEPDSSSGVGKSGKQPARKRLNFGQTGDSESVPDPQPLGEPPAAPTSLGSNTMASGGGAPMADNNEGADGVGSSSGNWHCDSQWLGDRVITTSTRTWALPTYNNHLYKQISNGTSGGATNDNTYFGYSTPWGYFDFNRFHCHFSPRDWQRLINNNWGFRPKRLSFKLFNIQVKEVTQNEGTKTIANNLTSTIQVFTDSEYQLPYVLGSAHQGCLPPFPADVFMVPQYGYLTLNNGSQAVGRSSFYCLEYFPSQMLRTGNNFTFSYTFEEVPFHSSYAHSQSLDRLMNPLIDQYLYYLSRTQTTGGTANTQTLGFSQGGPNTMANQAKNWLPGPCYRQQRVSTTTGQNNNSNFAWTAGTKYHLNGRNSLANPGIAMATHKDDEERFFPSNGILIFGKQNAARDNADYSDVMLTSEEEIKTTNPVATEEYGIVADNLQQQNTAPQIGTVNSQGDLPGMVWQNRDVYLQGPIWAKIPHTDGNFHPSPLMGGFGLKHPPPQILIKNTPVPADPPTTFNQSKLNSFITQYSTGQVSVEIEWELQKENSKRWNPEIQYTSNYYKSNNVEFAVNTEGVYSEPRPIGTRYLTRNL

SEQ ID NO: 361 - DNA, 2205 bp, Artificial Sequence
  source: /note="Description of Artificial Sequence: Synthetic polynucleotide"
atggctgctgacggttatcttccagattggctcgaggacaacctttctgaaggcattcgtgagtggtgggctctgaaacctggagtccctcaacccaaagcgaaccaacaacaccaggacaactgtcggggtcttgtgcttccgggttacaaatacctcggacccggtaacggactcgacaaaggagagccggtcaacgaggcggacgcggcagccctcgaacacgacaaggcctacgaccagcagctcaaggccggagacaacccgtacctcaagtacaaccacgccgacgccgagttccaggagcggctcaaagaagatacgtcttttgggggcaacctcgggcgagcagtcttccagaccaaaaagaggcttcttgaacctcttggtctggttgaggaagcggctaagacggctcctggaaagaagaggcctgtagagcagtctcctcaggaaccggactcctccgcgggtattggcaaatcgggtgcacagcccgctaaaaagagactcaatttcggtcagactggcgacacagagtcagtcccagaccctcaaccaatcggagaacctcccgcagccccctcaggtgtgggatctcttacaatggcttcaggtggtggcgcaccagtggcagacaataacgaaggtgccgatggagtgggtagttcctcgggaaattggcattgcgattcccaatggctgggggacagagtcatcaccaccagcacccgaacctgggccctgcccacctacaacaaccacctctacaaacaaatttccagccaatcaggagcctcgaacgacaatcactactttggctacagcaccccttgggggtattttgacttcaacagattccactgccacttttcaccacgtgactggcagcgactcatcaacaacaactggggattccggcccaagagactcagcttcaagctcttcaacatccaggtcaaagaggttacggacaacaatggagtcaagaccatcgccaataaccttaccagcacggtccaggtcttcacggactcagactatcagctcccgtacgtgctcgggtcggctcacgagggctgcctcccgccgttcccagcggacgttttcatgattcctcagtacgggtatctgacgcttaatgatggaagccaggccgtgggtcgttcgtccttttactgcctggaatatttcccgtcgcaaatgctaagaacgggtaacaacttccagttcagctacgagtttgagaacgtacctttccatagcagctacgctcacagccaaagcctggaccgactaatgaatccactcatcgaccaatacttgtactatctctcaaagactattaacggttctggacagaatcaacaaacgctaaaattcagtgtggccggacccagcaacatggctgtccagggaagaaactacatacctggacccagctaccgacaacaacgtgtctcaaccactgtgactcaaaacaacaacagcgaatttgcttggcctggagcttcttcttgggctctcaatggacgtaatagcttgatgaatcctggacctgctatggccagccacaaagaaggagaggaccgtttctttcctttgtctggatctttaatttttggcaaacaaggaactggaagagacaacgtggatgcggacaaagtcatgataaccaacgaagaagaaattaaaactactaacccggtagcaacggagtcctatggacaagtggccacaaaccaccagagtgcccaagcacaggcgcagaccggctgggttcaaaaccaaggaatacttccgggtatggtttggcaggacagagatgtgtacctgcaaggacccatctgggccaagattcctcacacggacggcaacttccacccgtctccgctgatgggcggctttggcctgaaacatcctccgcctcagatcctgatcaagaacacgcctgttcctgcgaatcctccggcggagttttcagctacaaagtttgcttcattcatcacccagtactccacaggacaagtgagtgtggaaattgaatgggagctgcagaaagaaaacagcaagcgctggaatcccgaagtgcagtacacatccaattatgcaaaatctgccaacgttgattttactgtggacaacaatggactttatactgagcctcgccccattggcacccgttaccttaccaaacctctgtaa

SEQ ID NO: 362 - protein, 734 aa, Artificial Sequence
  source: /note="Description of Artificial Sequence: Synthetic polypeptide"
MAADGYLPDWLEDNLSEGIREWWALKPGVPQPKANQQHQDNCRGLVLPGYKYLGPGNGLDKGEPVNEADAAALEHDKAYDQQLKAGDNPYLKYNHADAEFQERLKEDTSFGGNLGRAVFQTKKRLLEPLGLVEEAAKTAPGKKRPVEQSPQEPDSSAGIGKSGAQPAKKRLNFGQTGDTESVPDPQPIGEPPAAPSGVGSLTMASGGGAPVADNNEGADGVGSSSGNWHCDSQWLGDRVITTSTRTWALPTYNNHLYKQISSQSGASNDNHYFGYSTPWGYFDFNRFHCHFSPRDWQRLINNNWGFRPKRLSFKLFNIQVKEVTDNNGVKTIANNLTSTVQVFTDSDYQLPYVLGSAHEGCLPPFPADVFMIPQYGYLTLNDGSQAVGRSSFYCLEYFPSQMLRTGNNFQFSYEFENVPFHSSYAHSQSLDRLMNPLIDQYLYYLSKTINGSGQNQQTLKFSVAGPSNMAVQGRNYIPGPSYRQQRVSTTVTQNNNSEFAWPGASSWALNGRNSLMNPGPAMASHKEGEDRFFPLSGSLIFGKQGTGRDNVDADKVMITNEEEIKTTNPVATESYGQVATNHQSAQAQAQTGWVQNQGILPGMVWQDRDVYLQGPIWAKIPHTDGNFHPSPLMGGFGLKHPPPQILIKNTPVPANPPAEFSATKFASFITQYSTGQVSVEIEWELQKENSKRWNPEVQYTSNYAKSANVDFTVDNNGLYTEPRPIGTRYLTKPL

SEQ ID NO: 363 - DNA, 2211 bp, Artificial Sequence
  source: /note="Description of Artificial Sequence: Synthetic polynucleotide"
atggctgccgatggttatcttccagattggctcgaggacaacctctctgagggcattcgcgagtggtgggacttgaaacctggagcccctaaacccaaggcaaatcaacaacatcaggacaacgctcgaggtcttgtgcttccgggttacaaataccttggacccggcaacggactcgacaagggggagccggtcaacgcagcagacgcggcggccctcgagcacgacaaggcctacgaccagcagctcaaggccggagacaacccgtacctcaagtacaaccacgccgacgccgagttccaggagcggctcaaagaagatacgtcttttgggggcaacctcgggcgagcagtcttccaggccaaaaagaggcttcttgaacctcttggtctggttgaggaagcggctaagacggctcctggaaagaagagaccggtagagccatcaccccagcgttctccagactcctctacgggcatcggcaagaaaggccaacagcccgctaaaaagagactcaattttggtcagactggcgactcagagtcagtccccgacccacaacctctcggagaacctccagcaacccccgctgctgtgggacctactacaatggcttcaggcggtggcgcaccaatggcagacaataacgagggtgccgatggagtgggtaattcctcaggaaattggcattgcgattcccaatggctgggcgacagagtcatcaccaccagcaccagaacctgggccctgcccacttacaacaaccatctctacaagcaaatctccagccaatcaggagcttcaaacgacaaccactactttggctacagcaccccttgggggtattttgactttaacagattccactgccacttttcaccacgtgactggcaaagactcatcaacaacaactggggattccgacccaagagactcaacttcaagctcttcaacatccaagtcaaggaggtcacgacgaatgatggcgtcacgaccatcgctaataaccttaccagcacggttcaagtcttctcggactcggagtaccagttgccgtacgtcctcggctctgcgcaccagggctgcctccctccgttcccggcggacgtgttcatgattccgcagtacggctacctaacgctcaacaatggcagccaagccgtgggacgttcatccttttactgcctggaatatttcccttctcagatgctgagaacgggcaacaactttaccttcagctacacttttgaggacgttcctttccacagcagctacgctcacagccagagtctggaccgtctcatgaatcctctcatcgaccagtacctgtattacttgagcagaacaaacactccaagtggaaccaccacgcagtcaaggcttcagttttctcaggccggagcgagtgacattcgggaccagtctaggaactggcttcctggaccctgttaccgccagcagcgcgtttctaaaacaaaaacagacaacaacaacagcaattttacctggactggtgcttcaaaatataaccttaatgggcgtgaatctataatcaaccctggcactgctatggcctcacacaaagacgacgaagacaagttctttcccatgagcggtgtcatgatttttggaaaagagagcgccggagcttcaaacactgcattggacaatgtcatgatcacagacgaagaggaaatcaaagccactaaccccgtggccaccgaaagatttgggactgtggcagtcaatctccagagcagcagcacagaccctgcgaccggagatgtgcatgttatgggagcattacctggcatggtgtggcaagatagagacgtgtacctgcagggtcccatttgggccaaaattcctcacacagatggacactttcacccgtctcctcttatgggcggctttggactcaagaacccgcctcctcagatcctcatcaaaaacacgcctgttcctgcgaatcctccggcggagttttcagctacaaagtttgcttcattcatcacccaatactccacaggacaagtgagtgtggaaattgaatgggagctgcagaaagaaaacagcaagcgctggaatcccgaagtgcagtacacatccaattatgcaaaatctgccaacgttgattttactgtggacaacaatggactttatactgagcctcgccccattggcacccgttaccttacccgtcccctgtaa

SEQ ID NO: 364 - protein, 736 aa, Artificial Sequence
  source: /note="Description of Artificial Sequence: Synthetic polypeptide"
MAADGYLPDWLEDNLSEGIREWWDLKPGAPKPKANQQHQDNARGLVLPGYKYLGPGNGLDKGEPVNAADAAALEHDKAYDQQLKAGDNPYLKYNHADAEFQERLKEDTSFGGNLGRAVFQAKKRLLEPLGLVEEAAKTAPGKKRPVEPSPQRSPDSSTGIGKKGQQPAKKRLNFGQTGDSESVPDPQPLGEPPATPAAVGPTTMASGGGAPMADNNEGADGVGNSSGNWHCDSQWLGDRVITTSTRTWALPTYNNHLYKQISSQSGASNDNHYFGYSTPWGYFDFNRFHCHFSPRDWQRLINNNWGFRPKRLNFKLFNIQVKEVTTNDGVTTIANNLTSTVQVFSDSEYQLPYVLGSAHQGCLPPFPADVFMIPQYGYLTLNNGSQAVGRSSFYCLEYFPSQMLRTGNNFTFSYTFEDVPFHSSYAHSQSLDRLMNPLIDQYLYYLSRTNTPSGTTTQSRLQFSQAGASDIRDQSRNWLPGPCYRQQRVSKTKTDNNNSNFTWTGASKYNLNGRESIINPGTAMASHKDDEDKFFPMSGVMIFGKESAGASNTALDNVMITDEEEIKATNPVATERFGTVAVNLQSSSTDPATGDVHVMGALPGMVWQDRDVYLQGPIWAKIPHTDGHFHPSPLMGGFGLKNPPPQILIKNTPVPANPPAEFSATKFASFITQYSTGQVSVEIEWELQKENSKRWNPEVQYTSNYAKSANVDFTVDNNGLYTEPRPIGTRYLTRPL

SEQ ID NO: 365 - DNA, 2214 bp, Artificial Sequence; identical to SEQ ID NO: 337
  source: /note="Description of Artificial Sequence: Synthetic polynucleotide"

SEQ ID NO: 366 - protein, 737 aa, Artificial Sequence; identical to SEQ ID NO: 338
  source: /note="Description of Artificial Sequence: Synthetic polypeptide"

SEQ ID NO: 367 - DNA, 2205 bp, Artificial Sequence
  source: /note="Description of Artificial Sequence: Synthetic polynucleotide"
atggctgctgacggttatcttccagattggctcgaggacaacctttctgaaggcattcgtgagtggtgggctctgaaacctggagtccctcaacccaaagcgaaccaacaacaccaggacaaccgtcggggtcttgtgcttccgggttacaaatacctcggacccggtaacggactcgacaaaggagagccggtcaacgaggcggacgcggcagccctcgaacacgacaaggcctacgaccagcagctcaaggccggagacaacccgtacctcaagtacaaccacgccgacgccgagttccaggagcggctcaaagaagatacgtcttttgggggcaacctcgggcgagcagtcttccaggccaaaaagaggcttcttgaacctcttggtctggttgaggaagcggctaagacggctcctggaaagaagaggcctgtagagcagtctcctcaggaaccggactcctccgcgggtattggcaaatcgggtgcacagcccgctaaaaagagactcaatttcggtcagactggcgacacagagtcagtcccagaccctcaaccaatcggagaacctcccgcagccccctcaggtgtgggatctcttacaatggcttcaggtggtggcgcaccagtggcagacaataacgaaggtgccgatggagtgggtagttcctcgggaaattggcattgcgattcccaatggctgggggacagagtcatcaccaccagcacccgaacctgggccctgcccacctacaacaaccacctctacaaacaaatttccagccaatcaggagcctcgaacgacaatcactactttggctacagcaccccttgggggtattttgacttcaacagattccactgccacttttcaccacgtgactggcagcgactcatcaacaacaactggggattccggcccaagagactcagcttcaagctcttcaacatccaggtcaaagaggttacggacaacaatggagtcaagaccatcgccaataaccttaccagcacggtccaggtcttcacggactcagactatcagctcccgtacgtgctcgggtcggctcacgagggctgcctcccgccgttcccagcggacgttttcatgattcctcagtacgggtatctgacgcttaatgatggaagccaggccgtgggtcgttcgtccttttactgcctggaatatttcccgtcgcaaatgctaagaacgggtaacaacttccagttcagctacgagtttgagaacgtacctttccatagcagctacgctcacagccaaagcctggaccgactaatgaatccactcatcgaccaatacttgtactatctctcaaagactattaacggttctggacagaatcaacaaacgctaaaattcagtgtggccggacccagcaacatggctgtccagggaagaaactacatacctggacccagctaccgacaacaacgtgtctcaaccactgtgactcaaaacaacaacagcgaatttgcttggcctggagcttcttcttgggctctcaatggacgtaatagcttgatgaatcctggacctgctatggccagccacaaagaaggagaggaccgtttctttcctttgtctggatctttaatttttggcaaacaaggaactggaagagacaacgtggatgcggacaaagtcatgataaccaacgaagaagaaattaaaactactaacccggtagcaacggagtcctatggacaagtggccacaaaccaccagagtgcccaagcacaggcgcagaccggctgggttcaaaaccaaggaatacttccgggtatggtttggcaggacagagatgtgtacctgcaaggacccatttgggccaaaattcctcacacggacggcaactttcacccttctccgctgatgggagggtttggaatgaaacacccgcctcctcagatcctcatcaaaaacacacctgtacctgcggatcctccaacggccttcaacaaggacaagctgaactctttcatcacccagtattctactggccaagtcagcgtggagatcgagtgggagctgcagaaggaaaacagcaagcgctggaaccccgagatccagtacacctccaactactacaaatctacaagtgtggactttgctgttaatacagaaggcgtgtactctgaaccccgccccattggcacccgttacctcacccgtaatctgtaa

SEQ ID NO: 368 - protein, 734 aa, Artificial Sequence
  source: /note="Description of Artificial Sequence: Synthetic polypeptide"
MAADGYLPDWLEDNLSEGIREWWALKPGVPQPKANQQHQDNRRGLVLPGYKYLGPGNGLDKGEPVNEADAAALEHDKAYDQQLKAGDNPYLKYNHADAEFQERLKEDTSFGGNLGRAVFQAKKRLLEPLGLVEEAAKTAPGKKRPVEQSPQEPDSSAGIGKSGAQPAKKRLNFGQTGDTESVPDPQPIGEPPAAPSGVGSLTMASGGGAPVADNNEGADGVGSSSGNWHCDSQWLGDRVITTSTRTWALPTYNNHLYKQISSQSGASNDNHYFGYSTPWGYFDFNRFHCHFSPRDWQRLINNNWGFRPKRLSFKLFNIQVKEVTDNNGVKTIANNLTSTVQVFTDSDYQLPYVLGSAHEGCLPPFPADVFMIPQYGYLTLNDGSQAVGRSSFYCLEYFPSQMLRTGNNFQFSYEFENVPFHSSYAHSQSLDRLMNPLIDQYLYYLSKTINGSGQNQQTLKFSVAGPSNMAVQGRNYIPGPSYRQQRVSTTVTQNNNSEFAWPGASSWALNGRNSLMNPGPAMASHKEGEDRFFPLSGSLIFGKQGTGRDNVDADKVMITNEEEIKTTNPVATESYGQVATNHQSAQAQAQTGWVQNQGILPGMVWQDRDVYLQGPIWAKIPHTDGNFHPSPLMGGFGMKHPPPQILIKNTPVPADPPTAFNKDKLNSFITQYSTGQVSVEIEWELQKENSKRWNPEIQYTSNYYKSTSVDFAVNTEGVYSEPRPIGTRYLTRNL

SEQ ID NO: 369 - DNA, 2217 bp, Artificial Sequence
  source: /note="Description of Artificial Sequence: Synthetic polynucleotide"
atggctgccgatggttatcttccagattggctcgaggacaacctctctgagggcattcgcgagtggtgggcgctgaaacctggagccccgaagcccaaagccaaccagcaaaagcaggacgacggccggggtctggtgcttcctggctacaagtacctcggacccttcaacggactcgacaagggggagcccgtcaacgcggcggacgcagcggccctcgagcacgacaaggcctacgaccagcagctgcaggcgggtgacaatccgtacctgcggtataaccacgccgacgccgagtttcaggagcgtctgcaagaagatacgtcttttgggggcaacctcgggcgagcagtcttccaggccaagaagcgggttctcgaacctctcggtctggttgaggaaggcgctaagacggctcctggaaagaagagaccggtagagccatcaccccagcgttctccagactcctctacgggcatcggcaagaaaggccaacagcccgccagaaaaagactcaattttggtcagactggcgactcagagtcagttccagaccctcaacctctcggagaacctccagcagcgccctctggtgtgggacctaatacaatggctgcaggcggtggcgcaccaatggcagacaataacgaaggcgccgacggagtgggtagttcctcgggaaattggcattgcgattccacatggctgggcgacagagtcatcaccaccagcacccgaacctgggccctgcccacctacaacaaccacctctacaagcaaatctccaacgggacatcgggaggagccaccaacgacaacacctacttcggctacagcaccccctgggggtattttgactttaacagattccactgccacttttcaccacgtgactggcagcgactcatcaacaacaactggggattccggcccaagagactcagcttcaagctcttcaacatccaggtcaaggaggtcacgcagaatgaaggcaccaagaccatcgccaataacctcaccagcaccatccaggtgtttacggactcggagtaccagctgccgtacgttctcggctctgcccaccagggctgcctgcctccgttcccggcggacgtgttcatgattccccagtacggctacctaacactcaacaacggtagtcaggccgtgggacgctcctccttctactgcctggaatactttccttcgcagatgctgagaaccggcaacaacttccagtttacttacaccttcgaggacgtgcctttccacagcagctacgcccacagccagagcttggaccggctgatgaatcctctgattgaccagtacctgtactacttgtctcggactcaaacaacaggaggcacggcaaatacgcagactctgggcttcagccaaggtgggcctaatacaatggccaatcaggcaaagaactggctgccaggaccctgttaccgccaacaacgcgtctcaacgacaaccgggcaaaacaacaatagcaactttgcctggactgctgggaccaaataccatctgaatggaagaaattcattggctaatcctggcatcgctatggcaacacacaaagacgacgaggagcgtttttttcccagtaacgggatcctgatttttggcaaacaaaatgctgccagagacaatgcggattacagcgatgtcatgctcaccagcgaggaagaaatcaaaaccactaaccctgtggctacagaggaatacggtatcgtggcagataacttgcagcagcaaaacacggctcctcaaattggaactgtcaacagccagggggccttacccggtatggtctggcagaaccgggacgtgtacctgcagggtcccatctgggccaagattcctcacacggacggcaacttccacccctctcccctcatgggtggattcggacttaaacatcctccgcctcagatcctgatcaagaacacgcctgtacctgcggatcctccgaccaccttcaaccagtcaaagctgaactctttcatcacgcaatacagcaccggacaggtcagcgtggaaattgaatgggagctgcagaaggaaaacagcaagcgctggaaccccgagatccagtacacctccaactactacaaatctacaagtgtggactttgctgttaatacagaaggcgtgtactctgaaccccgccccattggcacccgttacctcacccgtaatctgtaa

SEQ ID NO: 370 - protein, 738 aa, Artificial Sequence; identical to SEQ ID NO: 116
  source: /note="Description of Artificial Sequence: Synthetic polypeptide"

SEQ ID NO: 371 - DNA, 2211 bp, Artificial Sequence
  source: /note="Description of Artificial Sequence: Synthetic polynucleotide"
atggctgctgacggttatcttccagattggctcgaggacaacctttctgaaggcattcgagagtggtgggcgctgcaacctggagcccctaaacccaaggcaaatcaacaacatcaggacaacgctcggggtcttgtgcttccgggttacaaatacctcggacccggcaacggactcgacaagggggaacccgtcaacgcagcggacgcggcagccctcgagcacgacaaggcctacgaccagcagctcaaggccggtgacaacccctacctcaagtacaaccacgccgacgccgagttccaggagcggctcaaagaagatacgtcttttgggggcaacctcgggcgagcagtcttccaggccaaaaagaggcttcttgaacctcttggtctggttgaggaagcggctaagacggctcctggaaagaagaggcctgtagatcagtctcctcaggaaccggactcatcatctggtgttggcaaatcgggcaaacagcctgccagaaaaagactaaatttcggtcagactggcgactcagagtcagtcccagaccctcaacctctcggagaaccaccagcagcccccacaagtttgggatctaatacaatggcttcaggcggtggcgcaccaatggcagacaataacgagggtgccgatggagtgggtaattcctcaggaaattggcattgcgattcccaatggctgggcgacagagtcatcaccaccagcaccagaacctgggccctgcccacttacaacaaccatctctacaagcaaatctccagccaatcaggagcttcaaacgacaaccactactttggctacagcaccccttgggggtattttgactttaacagattccactgccacttctcaccacgtgactggcagcgactcattaacaacaactggggattccggcccaagaaactcagcttcaagctcttcaacatccaagttaaagaggtcacgcagaacgatggcacgacgactattgccaataaccttaccagcacggttcaggtgtttacggactcggagtatcagctcccgtacgtgctcgggtcggcgcaccaaggctgtctcccgccgtttccagcggacgtcttcatggtccctcagtatggatacctcaccctgaacaacggaagtcaagcggtgggacgctcatccttttactgcctggagtacttcccttcgcagatgctaaggactggaaataacttccaattcagctataccttcgaggatgtaccttttcacagcagctacgctcacagccagagtttggatcgcttgatgaatcctcttattgatcagtatctgtactacctgaacagaacgcaaggaacaacctctggaacaaccaaccaatcacggctgctttttagccaggctgggcctcagtctatgtctttgcaggccagaaattggctacctgggccctgctaccggcaacagagactttcaaagactgctaacgacaacaacaacagtaactttccttggacagcggccagcaaatatcatctcaatggccgcgactcgctggtgaatccaggaccagctatggccagtcacaaggacgatgaagaaaaatttttccctatgcacggcaatctaatatttggcaaagaagggacaacggcaagtaacgcagaattagataatgtaatgattacggatgaagaagagattcgtaccaccaatcctgtggcaacagagcagtatggaactgtggcaaataacttgcagagctcaaatacagctcccacgactagaactgtcaatgatcagggggccttacctggcatggtgtggcaagatcgtgacgtgtaccttcaaggacctatctgggcaaagattcctcacacggatggacactttcatccttctcctctgatgggaggctttggactgaaacatccgcctcctcaaatcatgatcaaaaatactccggtaccggcaaatcctccgacgactttcagcccggccaagtttgcttcatttatcactcagtactccactggacaggtcagcgtggaaattgagtgggagctacagaaagaaaacagcaaacgttggaatccagagattcagtacacttccaactacaacaagtctgttaatgtggactttactgtagacactaatggtgtttatagtgaacctcgccccattggcacccgttaccttacccgtcccctgtaa

SEQ ID NO: 372 - protein, 736 aa, Artificial Sequence; identical to SEQ ID NO: 342
  source: /note="Description of Artificial Sequence: Synthetic polypeptide"

SEQ ID NO: 373 - DNA, 2211 bp, Artificial Sequence; identical to SEQ ID NO: 341
  source: /note="Description of Artificial Sequence: Synthetic polynucleotide"

SEQ ID NO: 374 - protein, 736 aa, Artificial Sequence; identical to SEQ ID NO: 342
  source: /note="Description of Artificial Sequence: Synthetic polypeptide"

SEQ ID NO: 375 - DNA, 2211 bp, Artificial Sequence
  source: /note="Description of Artificial Sequence: Synthetic polynucleotide"
atggctgctgacggttatcttccagattggctcgaggacaacctttctgaaggcattcgtgagtggtgggctctgaaacctggagtccctcaacccaaagcgaaccaacaacaccaggacaaccgtcggggtcttgtgcttccgggttacaaatacctcggacccggtaacggactcgacaaaggagagcccgtcaacgcggcggatgcagcggccctcgagcacgacaaggcctacgaccagcagctcaaagcgggtgacaatccgtacctgcggtataaccacgccgacgccgagtttcaggagcgtctgcaagaagatacgtcttttgggggcaacctcgggcgagcagtcttccaggccaagaagagggttctcgaaccttttggtctggttgaggaaggtgctaagacggctcctggaaagaaacgtccggtagagcagtcgccacaagagccagactcctcctcgggcatcggcaagacaggccagcagcccgctaaaaagagactcaattttggtcagactggcgactcagagtcagtccccgacccacaacctctcggagaacctccagcaacccccgctgctgtgggacctactacaatggcttcaggcggtggcgcaccaatggcagacaataacgaaggcgccgacggagtgggtaatgcctcaggaaattggcattgcgattccacatggctgggcgacagagtcatcaccaccagcacccgcacctgggccttgcccacctacaataaccacctctacaagcaaatctccagtgcttcaacgggggccagcaacgacaaccactacttcggctacagcaccccctgggggtattttgatttcaacagattccactgccatttctcaccacgtgactggcagcgactcatcaacaacaattggggattccggcccaagagactcaacttcaagctcttcaacatccaagtcaaggaggtcacgacgaatgatggcgtcacgaccatcgctaataaccttaccagcacggttcaagtcttctcggactcggagtaccagcttccgtacgtcctcggctctgcgcaccagggctgcctccctccgttcccggcggacgtgttcatgattccgcaatacggctacctgacgctcaacaatggcagccaagccgtgggacgttcatccttttactgcctggaatatttcccttctcagatgctgagaacgggcaacaactttaccttcagctacacctttgaggaagtgcctttccacagcagctacgcgcacagccagagcctggaccggctgatgaatcctctcatcgaccaatacctgtattacctgaacagaactcaaaatcagtccggaagtgcccaaaacaaggacttgctgtttagccgtgggtctccagctggcatgtctgttcagcccaaaaactggctacctggaccctgttatcggcagcagcgcgtttctaaaacaaaaacagacaacaacaacagcaattttacctggactggtgcttcaaaatataacctcaatgggcgtgaatccatcatcaaccctggcactgctatggcctcacacaaagacgacgaagacaagttctttcccatgagcggtgtcatgatttttggaaaagagagcgccggagcttcaaacactgcattggacaatgtcatgattacagacgaagaggaaattaaagccactaaccctgtggccaccgaaagatttgggaccgtggcagtcaatttccagagcagcagcacagaccctgcgaccggagatgtgcatgttatgggagccttacctggaatggtgtggcaagacagagacgtatacctgcagggtcctatttgggccaaaattcctcacacggatggacactttcacccgtctcctctcatgggcggctttggacttaagcacccgcctcctcagatcctcatcaaaaacacgcctgttcctgcgaatcctccggcagagttttcggctacaaagtttgcttcattcatcacccagtattccacaggacaagtgagcgtggagattgaatgggagctgcagaaagaaaacagcaaacgctggaatcccgaagtgcagtatacatctaactatgcaaaatctgccaacgttgatttcactgtggacaacaatggactttatactgagcctcgccccattggcacccgttacctcacccgtcccctgtaa

SEQ ID NO: 376 - protein, 736 aa, Artificial Sequence
  source: /note="Description of Artificial Sequence: Synthetic polypeptide"
MAADGYLPDWLEDNLSEGIREWWALKPGVPQPKANQQHQDNRRGLVLPGYKYLGPGNGLDKGEPVNAADAAALEHDKAYDQQLKAGDNPYLRYNHADAEFQERLQEDTSFGGNLGRAVFQAKKRVLEPFGLVEEGAKTAPGKKRPVEQSPQEPDSSSGIGKTGQQPAKKRLNFGQTGDSESVPDPQPLGEPPATPAAVGPTTMASGGGAPMADNNEGADGVGNASGNWHCDSTWLGDRVITTSTRTWALPTYNNHLYKQISSASTGASNDNHYFGYSTPWGYFDFNRFHCHFSPRDWQRLINNNWGFRPKRLNFKLFNIQVKEVTTNDGVTTIANNLTSTVQVFSDSEYQLPYVLGSAHQGCLPPFPADVFMIPQYGYLTLNNGSQAVGRSSFYCLEYFPSQMLRTGNNFTFSYTFEEVPFHSSYAHSQSLDRLMNPLIDQYLYYLNRTQNQSGSAQNKDLLFSRGSPAGMSVQPKNWLPGPCYRQQRVSKTKTDNNNSNFTWTGASKYNLNGRESIINPGTAMASHKDDEDKFFPMSGVMIFGKESAGASNTALDNVMITDEEEIKATNPVATERFGTVAVNFQSSSTDPATGDVHVMGALPGMVWQDRDVYLQGPIWAKIPHTDGHFHPSPLMGGFGLKHPPPQILIKNTPVPANPPAEFSATKFASFITQYSTGQVSVEIEWELQKENSKRWNPEVQYTSNYAKSANVDFTVDNNGLYTEPRPIGTRYLTRPL

SEQ ID NO: 377 - DNA, 2217 bp, Artificial Sequence
  source: /note="Description of Artificial Sequence: Synthetic polynucleotide"
atggctgccgatggttatcttccagattggctcgaggacaacctctctgagggcattcgcgagtggtgggacttgaaacctggagccccgaaacccaaagccaaccagcaaaagcaggacgacggccggggtctggtgcttcctggctacaagtacctcggacccttcaacggactcgacaagggggagcccgtcaacgcggcggatgcaacggccctcgagcacgacaaggcctacgaccagcagctgcaggcgggtgacaatccgtacctgcggtataaccacgccgacgccgagtttcaggagcgtctgcaagaagatacgtcttttgggggcaacctcgggcgagcagtcttccaggccaagaagcgggttctcgaacctctcggtctggttgaggaaggcgctaagacggctcctggaaagaagagaccggtagagccatcaccccagcgttctccagactcctctacgggcatcggcaagaaaggccaacagcccgccagaaaaagactcaattttggtcagactggcgactcagagtcagttccagaccctcaacctctcggagaaccaccagcagcccccacaagtttgggatctaatacaatggcttcaggcggtggcgcaccaatggcagacaataacgagggtgccgatggagtgggtaattcctcaggaaattggcattgcgattcccaatggctgggcgacagagtcatcaccaccagcacccgcacctgggccttgcccacctacaataaccacctctacaagcaaatctccagtgcttcaacgggggccagcaacgacaaccactacttcggctacagcaccccctgggggtattttgactttaaccgcttccactgccacttctcgccaagagactggcaaagactcatcaacaacaattggggattccggcccaagagactcaacttcaaactcttcaacatccaagtcaaggaggtcacgacgaatgatggcgtcacgaccatcgccaataacctcaccagcaccatccaggtgtttacggactcggagtaccagctgccgtacgttctcggctctgcccaccagggctgcctgcctccgttcccggcggacgtgttcatgattccccagtatggatacctcaccctgaacaacggaagtcaagcggtgggacgctcatccttttactgcctggagtacttcccttcgcagatgctaaggactggaaataacttccaattcagctataccttcgaggatgtaccttttcacagcagctacgctcacagccagagtttggatcgcttgatgaatcctcttattgatcagtatctgtactacctgaacagaacgcaaggaacaacctctggaacaaccaaccaatcacggctgctttttagccaggctgggcctcagtctatgtctttgcaggccagaaattggctacctgggccctgctaccggcaacagagactttcaaagactgctaacgacaacaacaacagtaactttccttggacagcagccagcaaatatcatctcaatggccgcgactcgctggtgaatccaggaccagctatggccagtcacaaggacgatgaagaaaaatttttccctatgcacggcaatctaatatttggcaaagaagggacaacggcaagtaacgcagaattagataatgtaatgattacggatgaagaagagattcgtaccaccaatcctgtggcaacagagcagtatggaactgtggcaaataacttgcagagctcaaatacagctcccacgactagaactgtcaatgatcagggggccttacctggcatggtgtggcaagatcgtgacgtgtaccttcaggggcccatctgggcaaagattccacacacggacggacattttcacccctctcccctcatgggtggattcggacttaaacaccctcctccgcagattctcatcaagaacaccccggtacctgcgaatccttcgaccaccttcagtgcggcaaagtttgcttccttcatcacacagtactccacgggacaggtcagcgtggagatcgagtgggagctgcagaaggaaaacagcaagcgctggaacccggagatccagtacacttccaactattacaagtctaataatgttgaatttgctgttaatactgaaggtgtatatagtgaaccccgccccattggcaccagatacctgactcgtaatctgtaa

SEQ ID NO: 378 - protein, 738 aa, Artificial Sequence
  source: /note="Description of Artificial Sequence: Synthetic polypeptide"
MAADGYLPDWLEDNLSEGIREWWDLKPGAPKPKANQQKQDDGRGLVLPGYKYLGPFNGLDKGEPVNAADATALEHDKAYDQQLQAGDNPYLRYNHADAEFQERLQEDTSFGGNLGRAVFQAKKRVLEPLGLVEEGAKTAPGKKRPVEPSPQRSPDSSTGIGKKGQQPARKRLNFGQTGDSESVPDPQPLGEPPAAPTSLGSNTMASGGGAPMADNNEGADGVGNSSGNWHCDSQWLGDRVITTSTRTWALPTYNNHLYKQISSASTGASNDNHYFGYSTPWGYFDFNRFHCHFSPRDWQRLINNNWGFRPKRLNFKLFNIQVKEVTTNDGVTTIANNLTSTIQVFTDSEYQLPYVLGSAHQGCLPPFPADVFMIPQYGYLTLNNGSQAVGRSSFYCLEYFPSQMLRTGNNFQFSYTFEDVPFHSSYAHSQSLDRLMNPLIDQYLYYLNRTQGTTSGTTNQSRLLFSQAGPQSMSLQARNWLPGPCYRQQRLSKTANDNNNSNFPWTAASKYHLNGRDSLVNPGPAMASHKDDEEKFFPMHGNLIFGKEGTTASNAELDNVMITDEEEIRTTNPVATEQYGTVANNLQSSNTAPTTRTVNDQGALPGMVWQDRDVYLQGPIWAKIPHTDGHFHPSPLMGGFGLKHPPPQILIKNTPVPANPSTTFSAAKFASFITQYSTGQVSVEIEWELQKENSKRWNPEIQYTSNYYKSNNVEFAVNTEGVYSEPRPIGTRYLTRNL

SEQ ID NO: 379 - DNA, 2208 bp, Artificial Sequence
  source: /note="Description of Artificial Sequence: Synthetic polynucleotide"
atggctgccgatggttatcttccagattggctcgaggacaaccttagtgaaggaattcgcgagtggtgggacttgaaacctggagccccgaagcccaaagccaaccagcaaaagcaggacgacggccggggtctggtgcttcctggctacaagtacctcggacccttcaacggactcgacaagggggagcccgtcaacgcggcggacgcagcggccctcgagcacgacaaggcctacgaccagcagctcaaagcgggtgacaatccgtacctgcggtataaccacgccgacgccgagtttcaggagcgtctgcaagaagatacgtcttttgggggcaacctcgggcgagcagtcttccaggccaagaagcgggttctcgaacctctcggtctggttgaggaaggtgctaagacggctcctggaaagaaacgtccggtagagcagtcgccacaagagccagactcctcctcgggcattggcaagacaggccagcagcccgctaaaaagagactcaattttggtcagactggcgactcagagtcagtccccgacccacaacctctcggagaacctccagcaacccccgctgctgtgggacctactacaatggcttcaggcggtggcgcaccaatggcagacaataacgaaggcgccgacggagtgggtaatgcctcaggaaattggcattgcgattccacatggctgggcgacagagtcatcaccaccagcacccgaacctgggccctgcccacctacaacaaccacctctacaaacaaatttccagccaatcaggagcctcgaacgacaatcactactttggctacagcaccccttgggggtattttgatttcaacagattccactgccacttttcaccacgtgactggcagcgactcatcaacaacaattggggattccggcccaagagactcagcttcaagctcttcaacatccaggtcaaggaggtcacgcagaatgaaggcaccaagaccatcgccaataaccttaccagcacggttcaagtgtttacggactcggagtatcagctcccgtacgtgctcggctcggcgcatcaaggatgcctcccgccgttcccagcagacgtcttcatggtgccacagtatggatacctcaccctgaacaacgggagtcaggcagtaggacgctcttcattttactgcctggagtactttccttctcagatgctgcgtaccggaaacaactttaccttcagctacacttttgaggacgttcctttccacagcagctacgctcacagccagagtctggaccgtctcatgaatcctctgattgaccagtacctgtattacttgagcagaacaaacactccaagtggaaccaccacgcagtcaaggcttcagttttctcaggccggagcgagtgacattcgggaccagtctaggaactggcttcctggaccctgttaccgccagcagcgagtatcaaagacatctgcggataacaacaacagtgaatactcgtggactggagctaccaagtaccacctcaatggcagagactctctggtgaatccgggcccggccatggcaagccacaaggactatgaagaaaagttttttcctcagagcggggttctcatctttgggaagcaaggctcagagaaaacaaatgtggacattgaaaaggtcatgattacagacgaagaggaaatcaggacaaccaatcccgtggctacggagcagtatggttctgtatctaccaacctccagagaggcaacagacaagcagctaccgcagatgtcaacacacaaggcgttcttccaggcatggtctggcaggacagagatgtgtaccttcaggggcccatctgggcaaagattccacacacggacggacattttcacccgtctccgctgatgggcggctttggcctgaaacatcctccgcctcagatcctgatcaagaacacgcctgtacctgcggatcctccgaccaccttcaaccagtcaaagctgaactctttcatcactcagtattctactggccaagtcagcgtggagatcgagtgggagctgcagaaggaaaacagcaagcgctggaaccccgagatccagtacacctccaactactacaaatctacaagtgtggactttgctgttaatacagaaggcgtgtactctgaaccccgccccattggcacccgttacctcacccgtaatctgtaa

SEQ ID NO: 380 - protein, 735 aa, Artificial Sequence
  source: /note="Description of Artificial Sequence: Synthetic polypeptide"
MAADGYLPDWLEDNLSEGIREWWDLKPGAPKPKANQQKQDDGRGLVLPGYKYLGPFNGLDKGEPVNAADAAALEHDKAYDQQLKAGDNPYLRYNHADAEFQERLQEDTSFGGNLGRAVFQAKKRVLEPLGLVEEGAKTAPGKKRPVEQSPQEPDSSSGIGKTGQQPAKKRLNFGQTGDSESVPDPQPLGEPPATPAAVGPTTMASGGGAPMADNNEGADGVGNASGNWHCDSTWLGDRVITTSTRTWALPTYNNHLYKQISSQSGASNDNHYFGYSTPWGYFDFNRFHCHFSPRDWQRLINNNWGFRPKRLSFKLFNIQVKEVTQNEGTKTIANNLTSTVQVFTDSEYQLPYVLGSAHQGCLPPFPADVFMVPQYGYLTLNNGSQAVGRSSFYCLEYFPSQMLRTGNNFTFSYTFEDVPFHSSYAHSQSLDRLMNPLIDQYLYYLSRTNTPSGTTTQSRLQFSQAGASDIRDQSRNWLPGPCYRQQRVSKTSADNNNSEYSWTGATKYHLNGRDSLVNPGPAMASHKDYEEKFFPQSGVLIFGKQGSEKTNVDIEKVMITDEEEIRTTNPVATEQYGSVSTNLQRGNRQAATADVNTQGVLPGMVWQDRDVYLQGPIWAKIPHTDGHFHPSPLMGGFGLKHPPPQILIKNTPVPADPPTTFNQSKLNSFITQYSTGQVSVEIEWELQKENSKRWNPEIQYTSNYYKSTSVDFAVNTEGVYSEPRPIGTRYLTRNL

SEQ ID NO: 381 - DNA, 2214 bp, Artificial Sequence
  source: /note="Description of Artificial Sequence: Synthetic polynucleotide"
atggctgccgatggttatcttccagattggctcgaggacaacctctctgagggcattcgcgagtggtgggacttgaaacctggagccccgaaacccaaagccaaccagcaaaagcaggacgacggccggggtctggtgcttcctggctacaagtacctcggacccttcaacggactcgacaagggggagcccgtcaacgcggcggatgcagcggccctcgagcacgacaaggcctacgaccagcagctcaaagcgggtgacaatccgtacctgcggtataaccacgccgacgccgagtttcaggagcgtctgcaagaagatacgtcttttgggggcaacctcgggcgagcagtcttccaggccaagaagagggttctcgaaccttttggtctggttgaggaaggtgctaagacggctcctggaaagaaacgtccggtagagcagtcgccacaagagccagactcctcctcgggcattggcaagacaggccagcagcctgcaagaaaaagattgaattttggtcagactggagacgcagactcagtacctgacccccagcctctcggacagccaccagcagccccctctggtctgggaactaatacgatggctacaggcagtggcgcaccaatggcagacaataacgagggcgccgacggagtgggtaattcctcgggaaattggcattgcgattcccaatggctgggggacagagtcatcaccaccagcacccgaacctgggccctgcccacctacaacaatcacctctacaagcaaatctccaacagcacatctggaggatcttcaaatgacaacgcctacttcggctacagcaccccctgggggtattttgatttcaacagattccactgccatttctcaccacgtgactggcagcgactcatcaacaacaattggggattccggcccaagagactcaacttcaagctcttcaacatccaggtcaaggaggtcacgcagaatgaaggcaccaagaccatcgccaataacctcaccagcaccatccaggtgtttacggactcggagtaccagctgccgtacgttctcggctctgcccaccagggctgcctgcctccgttcccggcggacgtgttcatgattccccagtacggctacctaacactcaacaacggtagtcaggccgtgggacgctcctccttctactgcctggaatactttccttcgcagatgctgagaaccggcaacaacttccagtttacttacaccttcgaggacgtgcctttccacagcagctacgcccacagccagagcttggaccggctgatgaatcctctgattgaccagtacctgtactacttgtctcggactcaaacaacaggaggcacgacaaatacgcagactctgggcttcagccaaggtgggcctaatacaatggccaatcaggcaaagaactggctgccaggaccctgttaccgccagcagcgagtatcaaagacatttgcggataacaacaacagtgaatactcgtggactggagctaccaagtaccacctcaatggcagagactctctggtgaatccgggcccggccatggcaagccacaaggacgatgaagaaaagttttttcctcagagcggggttctcatctttgggaagcaaggctcagagaaaacaaatgtggacattgaaaaggtcatgattacagacgaagaggaaatcaggacaaccaatcccgtggctacggagcagtatggttctgtatctaccaacctccagagaggcaacagacaagcagctaccgcagatgtcaacacacaaggcgttcttccaggcatggtctggcaggacagagatgtgtaccttcaggggcccatctgggcaaagattccacacacggacggacattttcacccctctcccctcatgggtggattcggacttaaacaccctccgcctcagatcctgatcaagaacacgcctgtacccgcggatcctccgaccaccttcaaccagtcaaagctgaactctttcatcacccagtattctactggccaagtcagcgtggagatcgagtgggagctgcagaaggaaaacagcaagcgctggaaccccgagatccagtacacctccaactactacaaatctacaagtgtggactttgctgttaatacagaaggcgtgtactctgaaccccgccccattggcacccgttacctcacccgtaatctgtaa

SEQ ID NO: 382 - protein, 737 aa, Artificial Sequence
  source: /note="Description of Artificial Sequence: Synthetic polypeptide"
MAADGYLPDWLEDNLSEGIREWWDLKPGAPKPKANQQKQDDGRGLVLPGYKYLGPFNGLDKGEPVNAADAAALEHDKAYDQQLKAGDNPYLRYNHADAEFQERLQEDTSFGGNLGRAVFQAKKRVLEPFGLVEEGAKTAPGKKRPVEQSPQEPDSSSGIGKTGQQPARKRLNFGQTGDADSVPDPQPLGQPPAAPSGLGTNTMATGSGAPMADNNEGADGVGNSSGNWHCDSQWLGDRVITTSTRTWALPTYNNHLYKQISNSTSGGSSNDNAYFGYSTPWGYFDFNRFHCHFSPRDWQRLINNNWGFRPKRLNFKLFNIQVKEVTQNEGTKTIANNLTSTIQVFTDSEYQLPYVLGSAHQGCLPPFPADVFMIPQYGYLTLNNGSQAVGRSSFYCLEYFPSQMLRTGNNFQFTYTFEDVPFHSSYAHSQSLDRLMNPLIDQYLYYLSRTQTTGGTTNTQTLGFSQGGPNTMANQAKNWLPGPCYRQQRVSKTFADNNNSEYSWTGATKYHLNGRDSLVNPGPAMASHKDDEEKFFPQSGVLIFGKQGSEKTNVDIEKVMITDEEEIRTTNPVATEQYGSVSTNLQRGNRQAATADVNTQGVLPGMVWQDRDVYLQGPIWAKIPHTDGHFHPSPLMGGFGLKHPPPQILIKNTPVPADPPTTFNQSKLNSFITQYSTGQVSVEIEWELQKENSKRWNPEIQYTSNYYKSTSVDFAVNTEGVYSEPRPIGTRYLTRNL

SEQ ID NO: 383 - DNA, 2217 bp, Artificial Sequence
  source: /note="Description of Artificial Sequence: Synthetic polynucleotide"
atggctgccgatggttatcttccagattggctcgaggacactctctctgaaggaataagacagtggtgggcgctgaaacctggagccccgaagcccaaagccaaccagcaaaagcaggacgacggccggggtctggtgcttcctggctacaagtacctcggacccttcaacggactcgacaagggggagcccgtcaacgcggcggatgcagcggccctcgagcacgacaaggcctacgaccagcagctcaaagcgggtgacaatccgtacctgcggtataaccacgccgacgccgagtttcaggagcgtctgcaagaagatacgtcttttgggggcaacctcgggcgagcagtcttccaggccaagaagcgggttctcgaacctctcggtctggttgaggaaggcgctaagacggctcctggaaagaagagaccggtagagccatcaccccagcgttctccagactcctctacgggcatcggcaagaaaggccaacagcccgccagaaaaagactcaattttggtcagactggcgactcagagtcagttccagaccctcaacctctcggagaaccaccagcagcccccacaagtttgggatctaatacaatggcttcaggcggtggcgcaccaatggcagacaataacgagggtgccgatggagtgggtaattcctcaggaaattggcattgcgattcccaatggctgggcgacagagtcatcaccaccagcacccgcacctgggccttgcccacctacaataaccacctctacaagcaaatctccagtgcttcaacgggggccagcaacgacaaccactacttcggctacagcaccccctgggggtattttgactttaaccgcttccactgccacttctcgccaagagactggcaaagactcatcaacaacaattggggattccggcccaagagactcaacttcaaactcttcaacatccaagtcaaggaggtcacgacgaatgatggcgtcacgaccatcgccaataacctcaccagcaccatccaggtgtttacggactcggagtaccagctgccgtacgttctcggctctgcccaccagggctgcctgcctccgttcccggcggacgtgttcatgattccccagtatggatacctcaccctgaacaacggaagtcaagcggtgggacgctcatccttttactgcctggagtacttcccttcgcagatgctaaggactggaaataacttccaattcagctataccttcgaggatgtaccttttcacagcagctacgctcacagccagagtttggatcgcttgatgaatcctcttattgatcagtatctgtactacctgaacagaacgcaaggaacaacctctggaacaaccaaccaatcacggctgctttttagccaggctgggcctcagtctatgtctttgcaggccagaaattggctacctgggccctgctaccggcaacagagactttcaaagactgctaacgacaacaacaacagtaactttccttggacagcagccagcaaatatcatctcaatggccgcgactcgctggtgaatccaggaccagctatggccagtcacaaggacgatgaagaaaaatttttccctatgcacggcaatctaatatttggcaaagaagggacaacggcaagtaacgcagaattagataatgtaatgattacggatgaagaagagattcgtaccaccaatcctgtggcaacagagcagtatggaactgtggcaaataacttgcagagctcaaatacagctcccacgactagaactgtcaatgatcagggggccttacctggcatggtgtggcaagatcgtgacgtgtaccttcaggggcccatctgggcaaagattccacacacggacggacattttcacccctctcccctcatgggtggattcggacttaaacaccctcctccgcagattctcatcaagaacaccccggtacctgcgaatccttcgaccaccttcagtgcggcaaagtttgcttccttcatcacacagtactccacgggacaggtcagcgtggagatcgagtgggagctgcagaaggaaaacagcaagcgctggaacccggagatccagtacacttccaactattacaagtctaataatgttgaatttgctgttaatactgaaggtgtatatagtgaaccccgccccattggcaccagatacctgactcgtaatctgtaa

SEQ ID NO: 384 - protein, 738 aa, Artificial Sequence
  source: /note="Description of Artificial Sequence: Synthetic polypeptide"
MAADGYLPDWLEDTLSEGIRQWWALKPGAPKPKANQQKQDDGRGLVLPGYKYLGPFNGLDKGEPVNAADAAALEHDKAYDQQLKAGDNPYLRYNHADAEFQERLQEDTSFGGNLGRAVFQAKKRVLEPLGLVEEGAKTAPGKKRPVEPSPQRSPDSSTGIGKKGQQPARKRLNFGQTGDSESVPDPQPLGEPPAAPTSLGSNTMASGGGAPMADNNEGADGVGNSSGNWHCDSQWLGDRVITTSTRTWALPTYNNHLYKQISSASTGASNDNHYFGYSTPWGYFDFNRFHCHFSPRDWQRLINNNWGFRPKRLNFKLFNIQVKEVTTNDGVTTIANNLTSTIQVFTDSEYQLPYVLGSAHQGCLPPFPADVFMIPQYGYLTLNNGSQAVGRSSFYCLEYFPSQMLRTGNNFQFSYTFEDVPFHSSYAHSQSLDRLMNPLIDQYLYYLNRTQGTTSGTTNQSRLLFSQAGPQSMSLQARNWLPGPCYRQQRLSKTANDNNNSNFPWTAASKYHLNGRDSLVNPGPAMASHKDDEEKFFPMHGNLIFGKEGTTASNAELDNVMITDEEEIRTTNPVATEQYGTVANNLQSSNTAPTTRTVNDQGALPGMVWQDRDVYLQGPIWAKIPHTDGHFHPSPLMGGFGLKHPPPQILIKNTPVPANPSTTFSAAKFASFITQYSTGQVSVEIEWELQKENSKRWNPEIQYTSNYYKSNNVEFAVNTEGVYSEPRPIGTRYLTRNL

SEQ ID NO: 385 - DNA, 2208 bp, Artificial Sequence; identical to SEQ ID NO: 21
  source: /note="Description of Artificial Sequence: Synthetic polynucleotide"

SEQ ID NO: 386 - protein, 735 aa, Artificial Sequence [sequence omitted]

SEQ ID NO: 387 - DNA, 2208 bp, Artificial Sequence
  source: /note="Description of Artificial Sequence: Synthetic polynucleotide"
atggctgccgatggttatcttccagattggctcgaggacaacctctctgagggcattcgcgagtggtgggcgctgaaacctggagccccgaagcccaaagccaaccagcaaaagcaggacgacggccggggtctggtgcttcctggctacaagtacctcggacccttcaacggactcgacaagggggagcccgtcaacgcggcggacgccgcggccctcgagcacgacaaggcctacgaccagcagctgcaggcgggtgacaatccgtacctgcggtataaccacgccgacgccgagtttcaggagcgtctgcaagaagatacgtcttttgggggcaacctcgggcgagcagtcttccaggccaaaaagaggcttcttgaacctcttggtctggttgaggaagcagctaaaacggctcctggaaagaagaggcctgtagagcagtctcctcaggaaccggactcctccgcgggtattggcaaatcgggtgcacagcccgccaaaaagagactcaatttcggtcagactggcgactcagagtcagtcccagaccctcaacctctcggagaaccaccagcagcccccacaagtttgggatctaatacaatggcttcaggcggtggcgcaccaatggcagacaataacgaaggcgccgacggagtgggtaatgcctcaggaaattggcattgcgattccacatggctgggcgacagagtcatcaccaccagcacccgcacctgggccttgcccacctacagcaaccatctctacaagcaaatctccagccaatcaggagcttcaaacgacaacgactactttggctacagcaccccttgggggtattttgatttcaacagattccactgccacttttcaccacgtgactggcaaagactcatcaacaacaactggggattccgacccaagagactcaacttcaagctctttaacattcaagtcaaagaggtcacgcagaatgacggtacgacgacgattgccaataaccttaccagcacggttcaggtgtttactgactcggagtaccagctcccgtacgtcctcggctcggcgcatcaaggatgcctcccgccgttcccagcagacgtcttcatggtgccacagtatggatacctcaccctgaacaacgggagtcaggcagtaggacgctcttcattttactgcctggagtactttccttctcagatgctgcgtaccggaaacaactttaccttcagctacacttttgaggacgttcctttccacagcagctacgctcacagccagagtctggaccgtctcatgaatcctctcatcgaccagtacctgtattacttgagcagaacaaacactccaagtggaaccaccacgcagtcaaggcttcagttttctcaggccggagcgagtgacattcgggaccagtctaggaactggcttcctggaccctgttaccgccagcagcgagtatcaaagacatctgaggataacaacaacagtgaatactcgtggactggagctaccaagtaccacctcaatggcagagactctctggtgaatccgggcccggccatggcaagccacaaggacgatgaagaaaagttttttcctcagagcggggttctcatctttgggaagcaaggctcagagaaaacaaatgtggacattgaaaaggtcatgattacagacgaagaggaaatcaggacaaccaatcccgtggctacggagcagtatggttctgtatctaccaacctccagagaggcaacagacaagcagctaccgcagatgtcaacacacaaggcgttcttccaggcatggtctggcaggacagagatgtgtaccttcaggggcccatctgggcaaagattccacacacggacggacattttcacccctctcccctcatgggtggattcggacttaaacaccctcctccacagattctcatcaagaacaccccggtacctgcgaatccttcgaccaccttcagtgcggcaaagtttgcttccttcatcacacagtactccacgggacaggtcagcgtggagatcgagtgggagctgcagaaggaaaacagcaaacgctggaatcccgaaattcagtacacttccaactacaacaagtctgttaatgtggactttactgtggacactaatggcgtgtattcagagcctcgccccattggcaccagatacctgactcgtaatctgtaa

SEQ ID NO: 388 - protein, 735 aa, Artificial Sequence
  source: /note="Description of Artificial Sequence: Synthetic polypeptide"
MAADGYLPDWLEDNLSEGIREWWALKPGAPKPKANQQKQDDGRGLVLPGYKYLGPFNGLDKGEPVNAADAAALEHDKAYDQQLQAGDNPYLRYNHADAEFQERLQEDTSFGGNLGRAVFQAKKRLLEPLGLVEEAAKTAPGKKRPVEQSPQEPDSSAGIGKSGAQPAKKRLNFGQTGDSESVPDPQPLGEPPAAPTSLGSNTMASGGGAPMADNNEGADGVGNASGNWHCDSTWLGDRVITTSTRTWALPTYSNHLYKQISSQSGASNDNDYFGYSTPWGYFDFNRFHCHFSPRDWQRLINNNWGFRPKRLNFKLFNIQVKEVTQNDGTTTIANNLTSTVQVFTDSEYQLPYVLGSAHQGCLPPFPADVFMVPQYGYLTLNNGSQAVGRSSFYCLEYFPSQMLRTGNNFTFSYTFEDVPFHSSYAHSQSLDRLMNPLIDQYLYYLSRTNTPSGTTTQSRLQFSQAGASDIRDQSRNWLPGPCYRQQRVSKTSEDNNNSEYSWTGATKYHLNGRDSLVNPGPAMASHKDDEEKFFPQSGVLIFGKQGSEKTNVDIEKVMITDEEEIRTTNPVATEQYGSVSTNLQRGNRQAATADVNTQGVLPGMVWQDRDVYLQGPIWAKIPHTDGHFHPSPLMGGFGLKHPPPQILIKNTPVPANPSTTFSAAKFASFITQYSTGQVSVEIEWELQKENSKRWNPEIQYTSNYNKSVNVDFTVDTNGVYSEPRPIGTRYLTRNL

SEQ ID NO: 389 - DNA, 2208 bp, Artificial Sequence
  source: /note="Description of Artificial Sequence: Synthetic polynucleotide"
atggctgccgatggttatcttccagattggctcgaggacaacctctctgagggcattcgcgagtggtgggcgctgaaacctggagccccgaagcccaaagccaaccagcaaaagcaggacgacggccggggtctggtgcttcctggctacaagtacctcggacccttcaacggactcgacaagggggagcccgtcaacgcggcggacgcagcggccctcgagcacgacaaggcctacgaccagcagctgcaggcgggtgacaatccgtacctgcggtataaccacgccgacgccgagttccaggagcgtctgcaagaagatacgtcttttgggggcaacctcgggcgagcagtcttccaggccaagaagagggttctcgaaccttttggtctggttgaggaaggtgctaagacggctcctggaaagaaacgtccggtagagcagtcgccacaagagccagactcctcctcgggcattggcaagacaggccagcagcccgctaaaaagagactcaattttggtcagactggcgactcagagtcagtcccagaccctcaacctctcggagaaccaccagcagcccccacaagtttgggatctaatacaatggcttcaggcggtggcgcaccaatggcagacaataacgagggcgccgacggagtgggtaattcctcgggaaattggcattgcgattccacatggatgggcgacagagtcatcaccaccagcacccgaacctgggccctgcccacctacaacaaccacctctacaaacaaatttccagccaatcaggagcttcaaacgacaaccactactttggctacagcaccccttgggggtattttgactttaacagattccactgccacttttcaccacgtgactggcagcgactcattaacaacaactggggattccggcccaagaaactcaacttcaagctctttaacatccaggtcaaggaggtcacgcagaatgaaggcaccaagaccatcgccaataacctcaccagcaccatccaggtgtttacggactcggagtaccagctgccgtacgttctcggctctgcccaccagggctgcctgcctccgttcccggcggacgtgttcatgattccccagtacggctacctaacactcaacaacggtagtcaggccgtgggacgctcctccttctactgcctggaatactttccttcgcagatgctgagaaccggcaacaacttccagtttacttacaccttcgaggacgtgcctttccacagcagctacgcccacagccagagcttggaccggctgatgaatcctctgattgaccagtacctgtattacttgtctcggactcaaacaacaggaggcacgacaaatacgcagactctgggcttcagccaaggtgggcctaatacaatggccaatcaggcaaagaactggctgcctggaccctgttaccgccagcagcgagtatcaaagacatctgcggataacaacaacagtgaatactcgtggactggagctaccaagtaccacctcaatggcagagactctctggtgaatccgggcccggccatggcaagccacaaggacgatgaagaaaagttttttcctcagagcggggttctcatctttgggaagcaaggctcagagaaaacaaatgtggacattgaaaaggttatgattacagacgaagaggaaatcaggacaaccaatcccgtggctacggagcagtatggttctgtatctaccaacctccagagaggcaacagacaagcagctaccgcagatgtcaacacacagggcgttcttccaggcatggtctggcaggacagagatgtgtaccttcagggtcccatttgggccaaaattcctcacacagatggacactttcacccgtcccctcttatgggcggctttggactcaagaacccgcctcctcagatcctcatcaaaaacacgcctgttcctgcgaatcctccggcagagttttcagctacaaagtttgcttcattcatcacccaatactccacaggacaagtgagtgtggaaattgaatgggagctgcagaaagaaaacagcaagcgctggaatcccgaagtgcagtacacatccaattatgcaaaatctgccaacgttgattttactgtggacactaatggcgtgtattcagagcctcgccccattggcaccagatacctcacccgtaatctgtaa

SEQ ID NO: 390 - protein, 735 aa, Artificial Sequence
  source: /note="Description of Artificial Sequence: Synthetic polypeptide"
MAADGYLPDWLEDNLSEGIREWWALKPGAPKPKANQQKQDDGRGLVLPGYKYLGPFNGLDKGEPVNAADAAALEHDKAYDQQLQAGDNPYLRYNHADAEFQERLQEDTSFGGNLGRAVFQAKKRVLEPFGLVEEGAKTAPGKKRPVEQSPQEPDSSSGIGKTGQQPAKKRLNFGQTGDSESVPDPQPLGEPPAAPTSLGSNTMASGGGAPMADNNEGADGVGNSSGNWHCDSTWMGDRVITTSTRTWALPTYNNHLYKQISSQSGASNDNHYFGYSTPWGYFDFNRFHCHFSPRDWQRLINNNWGFRPKKLNFKLFNIQVKEVTQNEGTKTIANNLTSTIQVFTDSEYQLPYVLGSAHQGCLPPFPADVFMIPQYGYLTLNNGSQAVGRSSFYCLEYFPSQMLRTGNNFQFTYTFEDVPFHSSYAHSQSLDRLMNPLIDQYLYYLSRTQTTGGTTNTQTLGFSQGGPNTMANQAKNWLPGPCYRQQRVSKTSADNNNSEYSWTGATKYHLNGRDSLVNPGPAMASHKDDEEKFFPQSGVLIFGKQGSEKTNVDIEKVMITDEEEIRTTNPVATEQYGSVSTNLQRGNRQAATADVNTQGVLPGMVWQDRDVYLQGPIWAKIPHTDGHFHPSPLMGGFGLKNPPPQILIKNTPVPANPPAEFSATKFASFITQYSTGQVSVEIEWELQKENSKRWNPEVQYTSNYAKSANVDFTVDTNGVYSEPRPIGTRYLTRNL

SEQ ID NO: 391 - DNA, 2214 bp, Artificial Sequence; identical to SEQ ID NO: 381
  source: /note="Description of Artificial Sequence: Synthetic polynucleotide"

SEQ ID NO: 392 - protein, 737 aa, Artificial Sequence; identical to SEQ ID NO: 382
  source: /note="Description of Artificial Sequence: Synthetic polypeptide"

SEQ ID NO: 393 - DNA, 2196 bp, Artificial Sequence
  source: /note="Description of Artificial Sequence: Synthetic polynucleotide"
atggctgctgacggttatcttccagattggctcgaggacaacctctctgagggcattcgcgagtggtgggcgctgaaacctggagccccgcaacccaaagccaaccagcaaaagcaggacgacggccggggtctggtgcttcctggctacaagtacctcggacccttcaacggactcgacaagggggagcccgtcaacgaggcggacgccgcggccctcgagcacgacaaggcctacgaccagcagctcaaagcgggtgacaatccgtacctgcggtataatcacgccgacgccgagtttcaagagcgtctgcaagaagatacgtcctttgggggcaacctcgggcgagcagtcttccaggccaaaaagagggtactcgagcctctgggtctggttgaggaaggcgctaagacggctcctggaaagaagcggccagtagaaccggactccagctcgggcatcggcaagtcaggccagcagcccgcgaaaaagagactgaattttgggcagactggcgactcagagtcagtgcctgacccccaacctctctcagaaccacccgcaggtccctctggtctgggatctggtacaatggctgctggcggtggcgctccaatggcagacaataacgaaggcgccgacggagtgggtaatgtctcaggaaattggcattgcgattccacatggctgggcgaccgagtcatcaccaccagcactcggacctgggccctccccacctacaacaaccacctctacaagcaaatctccaacgggacctcgggaggcagcagcaacgacaacacctactttggctacagcaccccctgggggtattttgactttaacagattccactgccacttttcaccacgtgactggcagcgactcatcaacaacaactgggggttccggcccaagaagctcaacttcaagctcttcaacatccaggtcaaggaggtcacccagaatgaaggcaccaagaccatcgccaataacctcaccagcacggtgcaggtctttacggactcggagtaccagctcccgtacgtgctcggctctgcccaccagggctgcctgcctccgttcccggcggacgtgttcatgattccgcagtacgggtacctgacgctgaacaacgggagccaggccgtggggcgatcctccttctactgcctggagtactttccctcgcagatgctgagaacgggcaacaactttaccttcagctacaccttcgaggacgtgcccttccacagcagctacgcgcacagccagagcctggaccggctgatgaacccgctgattgaccagtacctgtactacctgtctcggactcagaccaacgggaccaatgccacgcagactctgttgtttgctcaggccgggcctcagaacatgtcggctcaggccaagaactggctgcctggtccttgctatcggcagcagcgcgtctctacgacagtgtcgcaaaacaacaacagcaactttacctggaccggggcgaccaagtaccacctgaacggccgagactccctggtgagccccggtgtcgccatggcaacgcacaaggacgacgaggagcgcttcttcccgagcagcggggtcctgatgtttggcaagcagggcgctggaaaggacaatgtcgagtacaccaacgtgatgctcaccagcgaggaggagatcaagaccaccaaccctgtggccacggagcagtacggcgtggtggctgacaatctgcagcagaccaactcagctcccattgtgggggcagtcaacagccagggggccttacccggtatggtctggcagaaccgggacgtgtacctgcagggtcccatctgggccaagatcccgcatacggacggcaactttcacccgtctcctctcatgggcggctttggactgaaacacccgcctccccagatcctgatcaaaaacacgccggtacctgcggatcccccggtgaactttacggacgctaagctggcgagtttcatcacgcagtacagcaccgggcaggtcagcgtggagattgagtgggagctgcagaaggagaacagcaagcgctggaatcccgagattcagtacacttccaattattataaatcagctaatgtggactttgccgtcaatgcagatggtgtatatagtgaaccccgccccattggcactcgttacctcacccgtaatctgtaa

SEQ ID NO: 394 - protein, 731 aa, Artificial Sequence
  source: /note="Description of Artificial Sequence: Synthetic polypeptide"
MAADGYLPDWLEDNLSEGIREWWALKPGAPQPKANQQKQDDGRGLVLPGYKYLGPFNGLDKGEPVNEADAAALEHDKAYDQQLKAGDNPYLRYNHADAEFQERLQEDTSFGGNLGRAVFQAKKRVLEPLGLVEEGAKTAPGKKRPVEPDSSSGIGKSGQQPAKKRLNFGQTGDSESVPDPQPLSEPPAGPSGLGSGTMAAGGGAPMADNNEGADGVGNVSGNWHCDSTWLGDRVITTSTRTWALPTYNNHLYKQISNGTSGGSSNDNTYFGYSTPWGYFDFNRFHCHFSPRDWQRLINNNWGFRPKKLNFKLFNIQVKEVTQNEGTKTIANNLTSTVQVFTDSEYQLPYVLGSAHQGCLPPFPADVFMIPQYGYLTLNNGSQAVGRSSFYCLEYFPSQMLRTGNNFTFSYTFEDVPFHSSYAHSQSLDRLMNPLIDQYLYYLSRTQTNGTNATQTLLFAQAGPQNMSAQAKNWLPGPCYRQQRVSTTVSQNNNSNFTWTGATKYHLNGRDSLVSPGVAMATHKDDEERFFPSSGVLMFGKQGAGKDNVEYTNVMLTSEEEIKTTNPVATEQYGVVADNLQQTNSAPIVGAVNSQGALPGMVWQNRDVYLQGPIWAKIPHTDGNFHPSPLMGGFGLKHPPPQILIKNTPVPADPPVNFTDAKLASFITQYSTGQVSVEIEWELQKENSKRWNPEIQYTSNYYKSANVDFAVNADGVYSEPRPIGTRYLTRNL

SEQ ID NO: 395 - DNA, 2196 bp, Artificial Sequence
  source: /note="Description of Artificial Sequence: Synthetic polynucleotide"
atggctgctgacggttatcttccagattggctcgaggacaacctctctgagggcattcgcgagtggtgggcgctgaaacctggagccccgcaacccaaagccaaccagcaaaagcaggacgacggccggggtctggtgcttcctggctacaagtacctcggacccttcaacggactcgacaagggggagcccgtcaacgaggcggacgccgcggccctcgagcacgacaaggcctacgaccagcagctcaaagcgggtgacaatccgtacctgcggtataatcacgccgacgccgagtttcaagagcgtctgcaagaagatacgtcctttgggggcaacctcgggcgagcagtcttccaggccaaaaagagggtactcgagcctctgggtctggttgaggaaggcgctaagacggctcctggaaagaagcggccagtagaaccggactccagctcgggcatcggcaagtcaggccggcagcccgcgaaaaagagactgaattttgggcagactggcgactcagagtcagtgcctgacccccaacctctctcagaaccacccgcaggtccctctggtctgggatctggtacaatggctgcaggcggtggcgctccaatggcagacaataacgaaggcgccgacggagtgggtaatgcctcaggaaattggcattgcgattccacatggctgggcgaccgagtcatcaccaccagcactcggacctgggccctccccacctacaacaaccacctctacaagcaaatctccaacgggacctcgggaggcagcagcaacgacaacacctactttggctacagcaccccctgggggtattttgactttaacagattccactgccacttttcaccacgtgactggcagcgactcatcaacaacaactggggattccggcccaagaggctcaacttcaagctcttcaacatccaggtcaaggaggtcacccagaatgaaggcaccaagaccatcgccaataacctcaccagcacggtgcaggtctttacggactcgaagtaccagctcccgtacgtgctcggctctgcccaccagggctgcctgcctccgttcccggcggacgtgttcatgattccgcagtacgggtacctgacgctgaacaacgggagccaggccgtggggcgatcctccttctactgcctggagtactttccctcgcagatgctgagaacgggcaacaactttaccttcagctacaccttcgaggacgtgcccttccacagcagctacgcgcacagccagagcctggaccggctgatgaacccgctgattgaccagtacctgtactacctgtctcggactcagaccaacgggaccaatgccacgcagactctgttgtttgctcaggccgggcctcagaacatgtcggctcaggccaagaactggctgcctggtccttgctatcggcagcagcgcgtctctacgacagtgtcgcaaaacaacaacagcaactttacctggaccggggcgaccaagtaccacctgaacggccgagactccctggtgaaccccggtgtcgccatggcaacgcacaaggacgacgaggagcgcttcttcccgagcagcggggtcctgatgtttggcaagcagggcgctggaaaggacaatgtcgagtacaccaacgtgatgctcaccagcgaggaggagatcaagaccaccaaccctgtggccacggagcagtacggtgtggtggctgacaatctgcagcagaccaactcggctcccattgtgggggcagtcaacagccagggggccttacccggtatggtctggcagaaccgggacgtgtacctgcagggtcccatctgggccaagatcccgcatacggacggcaactttcacccgtctcctctcatgggcggctttggactgaaacacccgcctccccagatcctgatcaaaaacacgccggtacctgcggatcccccggtgaactttacggacgctaagctggcgagtttcatcacgcagtacagcaccgggcaggtcagcgtggagattgagtgggagctgcagaaggagaacagcaagcgctggaatcccgagattcagtacacttccaattattataaatcagctaatgtggactttgccgtcaatgcagatggtgtatatagtgaaccccgccccattggcactcgttacctcacccgtaatctgtaa

SEQ ID NO: 396 - protein, 731 aa, Artificial Sequence
  source: /note="Description of Artificial Sequence: Synthetic polypeptide"
MAADGYLPDWLEDNLSEGIREWWALKPGAPQPKANQQKQDDGRGLVLPGYKYLGPFNGLDKGEPVNEADAAALEHDKAYDQQLKAGDNPYLRYNHADAEFQERLQEDTSFGGNLGRAVFQAKKRVLEPLGLVEEGAKTAPGKKRPVEPDSSSGIGKSGRQPAKKRLNFGQTGDSESVPDPQPLSEPPAGPSGLGSGTMAAGGGAPMADNNEGADGVGNASGNWHCDSTWLGDRVITTSTRTWALPTYNNHLYKQISNGTSGGSSNDNTYFGYSTPWGYFDFNRFHCHFSPRDWQRLINNNWGFRPKRLNFKLFNIQVKEVTQNEGTKTIANNLTSTVQVFTDSKYQLPYVLGSAHQGCLPPFPADVFMIPQYGYLTLNNGSQAVGRSSFYCLEYFPSQMLRTGNNFTFSYTFEDVPFHSSYAHSQSLDRLMNPLIDQYLYYLSRTQTNGTNATQTLLFAQAGPQNMSAQAKNWLPGPCYRQQRVSTTVSQNNNSNFTWTGATKYHLNGRDSLVNPGVAMATHKDDEERFFPSSGVLMFGKQGAGKDNVEYTNVMLTSEEEIKTTNPVATEQYGVVADNLQQTNSAPIVGAVNSQGALPGMVWQNRDVYLQGPIWAKIPHTDGNFHPSPLMGGFGLKHPPPQILIKNTPVPADPPVNFTDAKLASFITQYSTGQVSVEIEWELQKENSKRWNPEIQYTSNYYKSANVDFAVNADGVYSEPRPIGTRYLTRNL

SEQ ID NO: 397 - DNA, 2196 bp, Artificial Sequence
  source: /note="Description of Artificial Sequence: Synthetic polynucleotide"
atggctgctgacggttatcttccagattggctcgaggacaacctctctgagggcattcgcgagtggtgggcgctgaaacctggagccccgcaacccaaagccaaccagcaaaagcaggacgacggccggggtctggtgcttcctggctacaagtacctcggacccttcaacggactcgacaagggggagcccgtcaacgaggcggacgccgcggccctcgagcacgacaaggcctacgaccagcagctcaaagcgggtgacaatccgtacctgcggtataatcacgccgacgccgagtttcaagagcgtctgcaagaagatacgtcctttgggggcaacctcgggcgagcagtcttccaggccaaaaagagggtactcgagcctctgggtctggttgaggaaggcgctaagacggctcctggaaagaagcggccagtagaaccggactccagctcgggcatcggcaagtcaggccagcagcccgcgaaaaagagactgaattttgggccgactggcgactcagagtcagtgcctgacccccaacctctctcagaaccacctgcaggtccctctggtctgggatctggtacaatggctgcaggcggtggcgctccaatggcagacaataacgaaggcgccgacggagtgggtaatgtctcaggaaattggcattgcgattccacatggctgggcgaccgagtcatcaccaccagcactcggacctgggccctccccacctacaacaaccacctctacaagcaaatctccaacgggacctcgggaggcagcagcaacgacaacacctactttggctacagcaccccctgggggtattttgactttaacagattccactgccacttttcaccacgcgactggcagcgactcatcaacaacaactggggattccggcccaagaagctcaacttcaagctcttcaacatccaggtcaaggaggtcacccagaatgaaggcaccaagaccaccgccaataacctcaccagcacggtgcaggtctttacggactcggagtaccagctcccgtacgtgctcggctctgcccaccagggctgcctgcctccgttcccggcggacgtgttcatgattccgcagtacgggtacctgacgctgaacaacgggagccaggccgtggggcgatcctccttctactgcctggagtactttccctcgcagatgctgagaacgggcaacaactttaccttcagctacaccttcgaggacgtgcccttccacagcagctacgcgcacagccagagcctggaccggctgatgaacccgctgattgaccagtacctgtactacctgtctcggactcagaccaacgggaccaatgccacgcagactctgttgtttgctcaggccgggcctcagaacatgtcggctcaggccaagaactggctgcctggtccttgctatcggcagcagcgcgtctctacggcagtgtcgcaaaacaacaacagcaactttacctggaccggggcgaccaagtaccacctgaacggccgagactccctggtgaaccccggtgtcgccatggcaacgcacaaggacgacgaggagcgcttcttcccgagcagcggggtcctgatgtttggcaagcagggcgctggaaaggacaatgtcgagtacaccaacgtgatgctcaccagcgaggaggagatcaagaccaccaaccctgtggccacggagcagtacggtgtggtggctgacaatctgcagcagaccaactcggctcccattgtgggggcagtcaacagccagggggccttacccggtatggtctggcagaaccgggacgtgtacctgcagggtcccatctgggccaagatcccgcatacggacggcaactttcacccgtctcctctcatgggcggctttggactgaaacacccgcctccccagatcctgatcaaaaacacgccggtacctgcggatcccccggtgaactttacggacgctaagctggcgagtttcatcacgcagtacagcaccgggcaggtcagcgtggagattgagtgggagctgcagaaggagaacagcaagcgctggaatcccgagattcagtacacttccaattattataaatcagctaatgtggactttgccgtcaatgcagatggtgtatatagcgaaccccgccccattggcactcgttacctcacccgtaatctgtaa

SEQ ID NO: 398 - protein, 731 aa, Artificial Sequence
  source: /note="Description of Artificial Sequence: Synthetic polypeptide"
MAADGYLPDWLEDNLSEGIREWWALKPGAPQPKANQQKQDDGRGLVLPGYKYLGPFNGLDKGEPVNEADAAALEHDKAYDQQLKAGDNPYLRYNHADAEFQERLQEDTSFGGNLGRAVFQAKKRVLEPLGLVEEGAKTAPGKKRPVEPDSSSGIGKSGQQPAKKRLNFGPTGDSESVPDPQPLSEPPAGPSGLGSGTMAAGGGAPMADNNEGADGVGNVSGNWHCDSTWLGDRVITTSTRTWALPTYNNHLYKQISNGTSGGSSNDNTYFGYSTPWGYFDFNRFHCHFSPRDWQRLINNNWGFRPKKLNFKLFNIQVKEVTQNEGTKTTANNLTSTVQVFTDSEYQLPYVLGSAHQGCLPPFPADVFMIPQYGYLTLNNGSQAVGRSSFYCLEYFPSQMLRTGNNFTFSYTFEDVPFHSSYAHSQSLDRLMNPLIDQYLYYLSRTQTNGTNATQTLLFAQAGPQNMSAQAKNWLPGPCYRQQRVSTAVSQNNNSNFTWTGATKYHLNGRDSLVNPGVAMATHKDDEERFFPSSGVLMFGKQGAGKDNVEYTNVMLTSEEEIKTTNPVATEQYGVVADNLQQTNSAPIVGAVNSQGALPGMVWQNRDVYLQGPIWAKIPHTDGNFHPSPLMGGFGLKHPPPQILIKNTPVPADPPVNFTDAKLASFITQYSTGQVSVEIEWELQKENSKRWNPEIQYTSNYYKSANVDFAVNADGVYSEPRPIGTRYLTRNL

SEQ ID NO: 399 - DNA, 4404 bp, Artificial Sequence
  source: /note="Description of Artificial Sequence: Synthetic polynucleotide"
atggctgccgatggttatcttccagattggctcgagggcaacctctctgagggcattcgcgagtggtgggacttgaaacctggagccccgaaacccaaagccaaccagcaaaagcaggacgacggccggggtctggtgcttcctggctacaggtacctcggacccttcaacggactcgacaagggagagccggtcaacgaggcagacgccgcggccctcgagcacgacaaggcctacgacaagcagctcgagcagggggacaacccgtacctcaagtacaaccacgccgacgccgagtttcaggagcgtcttcaagaagatacgtcttttgggggcaacctcgggcgagcagtcttccaggccaagaagcgggttctcgaacctctcggtctggttgaggaaggcgctaagacggctcctggaaagaagagacccatagaatcccccgactcctccacgggcatcggcaagaacggccagccgcccgctaaaaagaagctcaactttgggcagactggcgactcagagtcagtgcccgacccccaacctctcggagaacctcccgccgcgccctcaggtctgggatctggtacaatggctgcaggcggtggcgcaccaatggcagacaataacgaaggcgccgacggagtgggtaatgcctccggaaattggcattgcgattccacatggctgggcgacagagtcatcaccaccagcacccgcacctgggccctgcccacctacaacaaccacctctacaagcagatatcaagtcagagcggggctaccaacgacaaccacttcttcggctacagcaccccctggggctattttgacttcaacagattccactgccacttctcaccacgtgactggcagcgactcatcaacaacaactggggattccggcccagaaagctgcggttcaagttgttcaacatccaggtcaaggaggtcacgacgaacgacggcgttacgaccatcgctaataaccttaccagcacgattcaggtcttctcggactcggagtaccaactgccgtacgtcctcggctctgcgcaccagggctgcctccctccgttccctgcggacgtgttcatgattcctcagtacggatatctgactctaaacaacggcagtcagtctgtgggacgttcctccttctactgcctggagtactttccttctcagatgctgagaacgggcgataactttgaattcagctacacctttgaggaagtgcctttccacagcagctatgcgcacagccagagcctggaccggctgatgaatcccctcatcgaccagtacctgtactacctggcccggacccagagcactacggggtccacaagggagctgcagttccatcaggctgggcccaacaccatggccgagcaatcaaagaactggctgcccggaccctgttatcggcagcagagactgtcaaaaaacatagacagcaacaacaacagtaactttgcctggaccggggccactaaataccatctgaatggtagaaattcattaaccaacccgggcgtagccatggccaccaacaaggacgacgaggaccagttctttcccatcaacggagtgctggtttttggcaaaacgggggctgccaacaagacaacgctggaaaacgtgctaatgaccagcgaggaggagatcaaaaccaccaatcccgtggctacagaagaatacggtgtggtctccagcaacctgcaatcgtctacggccggaccccagacacagactgtcaacagccagggggctctgcccggcatggtctggcagaaccgggacgtgtacctgcagggtcccatctgggccaaaattcctcacacggacggcaactttcacccgtctcccctgatgggcggatttggactcaaacacccgcctcctcaaattctcatcaaaaacaccccggtacctgctaatcctccagaggtgtttactcctgccaagtttgcctcatttatcacgcagtacagcaccggccaggtcagcgtggagatcgagtgggaactgcagaaagaaaacagcaaacgctggaatccagagattcagtacacctcaaattatgccaagtctaataatgtggaatttgctgtcaacaacgaaggggtttatactgagcctcgccccattggcacccgttacctcacccgtaacctgtaaatggctgccgatggttatcttccagattggctcgaggacaacctctctgagggcattcgcgagtggtgggacttgaaacctggagccccgaaacccaaagccaaccagcaaaagcaggacgacggccggggtctggtgcttcctggctacaagtacctcggacccttcaacggactcgacaagggggagcccgtcaacgcggcggacgcagcggccctcgagcacgacaaggcctacgaccagcagctcaaagcgggtgacaatccgtacctgcggtataaccacgccgacgccgagtttcaggagcgtctgcaagaagatacgtcttttgggggcaacctcgggcgagcagtcttccaggccaagaagcgggttctcgaacctctcggtctggttgaggaaggcgctaagacggctcctggaaagaagagaccggtagagccatcaccccagcgttctccagactcctctacgggcatcggcaagaaaggccagcagcccgcgaaaaagagactcaactttgggcagactggcgactcagagtcagtgcccgaccctcaaccaatcggagaaccccccgcaggcccctctggtctgggatctggtacaatggctgcaggcggtggcgctccaatggcagacaataacgaaggcgccgacggagtgggtagttcctcaggaaattggcattgcgattccacatggctgggcgacagagtcatcaccaccagcacccgaacctgggccctccccacctacaacaaccacctctacaagcaaatctccaacgggacttcgggaggaagcaccaacgacaacacctacttcggctacagcaccccctgggggtattttgactttaacagattccactgccacttctcaccacgtgactggcagcgactcatcaacaacaactggggattccggcccaagagactcaacttcaagctcttcaacatccaggtcaaggaggtcacgcagaatgaaggcaccaagaccatcgccaataaccttaccagcacgattcaggtctttacggactcggaataccagctcccgtacgtcctcggctctgcgcaccagggctgcctgcctccgttcccggcggacgtcttcatgattcctcagtacgggtacctgactctgaacaatggcagtcaggccgtgggccgttcctccttctactgcctggagtactttccttctcaaatgctgagaacgggcaacaactttgagttcagctaccagtttgaggacgtgccttttcacagcagctacgcgcacagccaaagcctggaccggctgatgaaccccctcatcgaccagtacctgtactacctgtctcggactcagtccacgggaggtaccgcaggaactcagcagttgctattttctcaggccgggcctaataacatgtcggctcaggccaaaaactggctacccgggccctgctaccggcagcaacgcgtctccacgacactgtcgcaaaataacaacagcaactttgcctggaccggtgccaccaagtatcatctgaatggcagagactctctggtaaatcccggtgtcgctatggcaacccacaaggacgacgaagagcgattttttccgtccagcggagtcttaatgtttgggaaacagggagctggaaaagacaacgtggactatagcagcgttatgctaaccagtgaggaagaaattaaaaccaccaacccagtggccacagaacagtacggcgtggtggccgataacctgcaacagcaaaacgccgctcctattgtaggggccgtcaacagtcaaggagccttacctggcatggtctggcagaaccgggacgtgtacctgcagggtcctatctgggccaagattcctcacacggacggaaactttcatccctcgccgctgatgggaggctttggactgaaacacccgcctcctcagatcctgattaagaatacacctgttcccgcggatcctccaactaccttcagtcaagctaagctggcgtcgttcatcacgcagtacagcaccggacaggtcagcgtggaaattgaatgggagctgcagaaagaaaacagcaaacgctggaacccagagattcaatacacttccaactactacaaatctacaaatgtggactttgctgttaacacagatggcacttattctgagcctcgccccatcggcacccgttacctcacccgtaatctgtaa

SEQ ID NO: 400 - protein, 738 aa, Artificial Sequence; identical to SEQ ID NO: 18
  source: /note="Description of Artificial Sequence: Synthetic polypeptide"

SEQ ID NO: 401 - DNA, 3129 bp, Artificial Sequence
  source: /note="Description of Artificial Sequence: Synthetic polynucleotide"
gaattcgccctttctacggctgcgtcaactggaccaatgagaactttcccttcaacgattgcgtcgacaagatggtgatctggtgggaggagggcaagatgacggccaaggtcgtggagtccgccaaggccattctcggcggcagcaaagtgcgcgtggaccaaaagtgcaagtcgtccgcccagatcgaccccacccccgtgatcgtcacctccaacaccaacatgtgcgccgtgattgacgggaacagcaccaccttcgagcaccagcagccgttgcaggaccggatgttcaagtttgaactcacccgccgtctggagcacgactttggcaaggtgacaaagcaggaagtcagagagttcttccgctgggcgcaggatcacgtgaccgaggtggcgcacgagttctacgtcagaaagggtggagccaacaagagacccgcccccgatgacgcggataaaagcgagcccaagcgggcctgcccctcagtcgcggatccatcgacgtcagacgcggaaggagctccggtggactttgccgacaggtaccaaaacaaatgttctcgtcacgcgggcatgcttcagatgctgtttccctgcaaaacatgcgagagaatgaatcagaatttcaacatttgcttcacgcacgggaccagagactgttcagaatgtttccccggcgtgtcagaatctcaaccggtcgtcagaaaaaagacgtatcggaaactctgtgcgattcatcatctgctgggggcgggcacccgagattgcttgctcggcctgcgatctggtcaacgtggacctagatgactgtgtttctgagcaataaatgacttaaaccaggtatggctgccgatggttatcttccagattggctcgaggacaacctctctgagggcattcgcgagtggtgggacttgaaacctggagccccgaaacccaaagccaaccagcaaaagcaggacgacggccggggtctggtgcttcctggctacaagtacctcggacccttcaacggactcgacaagggggagcccgtcaacgcggcggacgcagcggccctcgagcacgacaaggcctacgaccagcagctcaaagcgggtgacaatccgtacctgcggtataaccacgccgacgccgagtttcaggagcgtctgcaagaagatacgtcttttgggggcaacctcgggcgagcagtcttccaggccaagaagcgggttctcgaacctctcggtctggttgaggaaggcgctaagacggctcctggaaagaagagaccggtagagccatcaccccagcgttctccagactcctctacgggcatcggcaagaaaggccagcagcccgcgaaaaagagactcaactttgggcagactggcgactcagagtcagtgcccgaccctcaaccaatcggagaaccccccgcaggcccctctggtctgggatctggtacaatggctgcaggcggtggcgctccaatggcagacaataacgaaggcgccgacggagtgggtagttcctcaggaaattggcattgcgattccacatggctgggcgacagagtcatcaccaccagcacccgaacctgggccctccccacctacaacaaccacctctacaagcaaatctccaacgggacttcgggaggaagcaccaacgacaacacctacttcggctacagcaccccctgggggtattttgactttaacagattccactgccacttctcaccacgtgactggcagcgactcatcaacaacaactggggattccggcccaagagactcaacttcaagctcttcaacatccaggtcaaggaggtcacgcagaatgaaggcaccaagaccatcgccaataaccttaccagcacgattcaggtctttacggactcggaataccagctcccgtacgtcctcggctctgcgcaccagggctgcctgcctccgttcccggcggacgtcttcatgattcctcagtacgggtacctgactctgaacaatggcagtcaggccgtgggccgttcctccttctactgcctggagtactttccttctcaaatgctgagaacgggcaacaactttgagttcagctaccagtttgaggacgtgccttttcacagcagctacgcgcacagccaaagcctggaccggctgatgaaccccctcatcgaccagtacctgtactacctgtctcggactcagtccacgggaggtaccgcaggaactcagcagttgctattttctcaggccgggcctaataacatgtcggctcaggccaaaaactggctacccgggccctgctaccggcagcaacgcgtctccacgacactgtcgcaaaataacaacagcaactttgcctggaccggtgccaccaagtatcatctgaatggcagagactctctggtaaatcccggtgtcgctatggcaacccacaaggacgacgaagagcgattttttccgtccagcggagtcttaatgtttgggaaacagggagctggaaaagacaacgtggactatagcagcgttatgctaaccagtgaggaagaaattaaaaccaccaacccagtggccacagaacagtacggcgtggtggccgataacctgcaacagcaaaacgccgctcctattgtaggggccgtcaacagtcaaggagccttacctggcatggtctggcagaaccgggacgtgtacctgcagggtcctatctgggccaagattcctcacacggacggaaactttcatccctcgccgctgatgggaggctttggactgaaacacccgcctcctcagatcctgattaagaatacacctgttcccgcggatcctccaactaccttcagtcaagctaagctggcgtcgttcatcacgcagtacagcaccggacaggtcagcgtggaaattgaatgggagctgcagaaagaaaacagcaaacgctggaacccagagattcaatacacttccaactactacaaatctacaaatgtggactttgctgttaacacagatggcacttattctgagcctcgccccatcggcacccgttacctcacccgtaatctgtaattgcttgttaatcaataaaccggttgattcgtttcagttgaactttggtctctgcgaagggcgaattc

SEQ ID NO: 402 - protein, 738 aa, Artificial Sequence; identical to SEQ ID NO: 18
  source: /note="Description of Artificial Sequence: Synthetic polypeptide"

SEQ ID NO: 403 - protein, 733 aa, Artificial Sequence
  source: /note="Description of Artificial Sequence: Synthetic polypeptide"
MAADGYLPDWLEDNLSEGIREWWDLRPGAPKPKANQQKQDDGRGLVLPGYKYLGPFNGLDKGEPVNEADAAALEHDKAYDKQLEQGDNPYLKYNHADAEFQERLQEDTSFGGNLGRAVFQAKKRVLEPLGLVEEGAKTAPGKKRPIESPDSSTGIGKKGQQPAKKRLNFGQTGDSESVPDPQPIGEPPAGPSGLGSGTMAAGGGAPMADNNEGADGVGSSSGNWHCDSTWLGDRVITTSTRTWALPTYNNHLYKQISNGTSGGSTNDNTYFGYSTPWGYFDFNRFHCHFSPRDWQRLINNNWGFRPKRLNFKLFNIQVKEVTQNEGTKTIANNLTSTIQVFTDSEYQLPYVLGSAHQGCLPPFPADVFMIPQYGYLTLNNGSQAVGRSSFYCLEYFPSQMLRTGNNFEFSYQFEDVPFHSSYAHSQSLDRLMNPLIDQYLYYLSRTQSTGGTAGTQQLLFSQAGPNNMSAQAKNWLPGPCYRQQRVSTTVSQNNNSNFAWTGATKYHLNGRDSLVNPGVAMATHKGDEERFFPSSGVLMFGKQGAGKDNVDYSSVMLTSEEEIKTTNPVATEQYGVVADNLQQQNAAPIVGAVNSQGALPGMVWQNRDVYLQGPIWAKIPHTDGNFHPSPLMGGFGLKHPPPQILIKNTPVPADPPTTFSQAKLASFITQYSTGQVSVEIEWELQKENSKRWNPEIQYTSNYYKSTNVDFAVNTEGTYSEPRPIGTRYLTRNL

SEQ ID NO: 404 - DNA, 2501 bp, Artificial Sequence
  source: /note="Description of Artificial Sequence: Synthetic polynucleotide"
gaattcgcccttggctgcgtcaactggaccaatgagaactttcccttcaacgattgcgtcgacaagatggtgatctggtgggaggagggcaagatgacggccaaggtcgtggagtccgccaaggccattcatcatctgctggggcgggctcccgagattgcttgctcggcctgcgatctggtcaacgtggacctggatgactgtgtttctgagcaataaatgacttaaaccaggtatggctgccgatggttatcttccagattggctcgaggacaacctctctgagggcattcgcgagtggtgggacttgagacctggagccccgaaacccaaagccaaccagcaaaagcaggacgacggccggggtctggtgcttcctggctacaagtacctcggacccttcaacggactcgacaagggagagccggtcaacgaggcagacgccgcggccctcgagcacgacaaggcctacgacaagcagctcgagcagggggacaacccgtacctcaagtacaaccacgccgacgccgagtttcaggagcgtcttcaagaagatacgtcttttgggggcaacctcgggcgagcagtcttccaggccaagaagcgggttctcgaacctctcggtctggttgaggaaggcgctaagacggctcctggaaagaagagacccatagaatcccccgactcctccacgggcatcggcaagaaaggccagcagcccgctaaaaagagactcaactttgggcagactggcgactcagagtcagtgcccgaccctcaaccaatcggagaaccccccgcaggcccctctggtctgggatctggcacaatggctgcaggcggtggcgctccaatggcagacaataacgaaggcgccgacggagtgggtagttcctcaggaaattggcattgcgattccacatggctgggcgacagagtcatcaccaccagcacccgaacctgggccctccccacctacaacaaccacctctacaagcaaatctccaacgggacatcgggaggaagcaccaacgacaacacctacttcggctacagcaccccctgggggtattttgactttaacagattccactgccacttctcaccacgtgactggcagcgactcatcaacaacaactggggattccggcccaagagactcaacttcaagctcttcaacatccaggtcaaggaggtcacgcagaatgaaggcaccaagaccatcgccaataaccttaccagcacgattcaggtctttacggactcggaataccagctcccgtacgtcctcggctctgcgcaccagggctgcctgcctccgttcccggcggacgtcttcatgattcctcagtacgggtacctgactctgaacaacggcagtcaggccgtgggccgttcctccttctactgcctggagtactttccttctcaaatgctgagaacgggcaacaactttgagttcagctaccagtttgaggacgtgccttttcacagcagctatgcgcacagccaaagcctggaccggctgatgaaccccctcatcgaccagtacctgtactacctgtctcggactcagtccacgggaggtaccgcaggaactcagcagttgctattttctcaggccgggcctaataacatgtcggctcaggccaaaaactggctacccgggccctgctaccggcagcaacgcgtctccacgacagtgtcgcaaaataacaacagcaactttgcttggaccggtgccaccaagtatcatctgaatggcagagactctctggtaaatcccggtgtcgctatggcaacgcacaagggcgacgaagagcgattttttccatccagcggagtcttgatgtttgggaaacagggagctggaaaagacaacgtagactatagcagcgttatgctaaccagtgaggaagaaatcaaaaccaccaacccagtggccacagaacagtacggcgtggtggccgataacctgcaacagcaaaacgccgctcctattgtaggggccgtcaacagtcaaggagccttacctggcatggtctggcagaaccgggacgtgtacctgcagggtcctatctgggccaagattcctcacacggacggcaactttcatccttcgccgctgatgggaggctttggactgaaacacccgcctcctcagatcctgattaagaatacacctgttcccgcggatcctccaactaccttcagtcaagccaagctggcgtcgttcatcacgcagtacagcaccggacaggtcagcgtggaaattgaatgggagctgcagaaagagaacagcaagcgctggaacccagagattcagtatacttccaactactacaaatctacaaatgtggactttgctgtcaatactgagggtacttattcagagcctcgccccattggcacccgttacctcacccgtaacctgtaattgcctgttaatcaataaaccggttgattcgtttcagttgaactttggtctcaagggcgaattc

SEQ ID NO: 405 - DNA, 2187 bp, Artificial Sequence
  source: /note="Description of Artificial Sequence: Synthetic polynucleotide"
atggctgccgatggttatcttccagattggctcgaggacaacctctctgagggcattcgcgagtggtgggacttgaaacctggagccccgaaacccaaagccaaccagcaaaagcaggacgacggccggggtctggtgcttcctggctacaagtacctcggacccttcaacggactcgacaagggagagccggtcaacgaggcagacgccgcggccctcgagcacgacaaggcctacgacaagcagctcgagcagggggacaacccgtacctcaagtacaaccacgccgacgccgagtttcaggagcgtcttcaagaagatacgtcttttgggggcaacctcgggcgagcagtcttccaggccaagaagcgggttctcgaacctctcggtctggttgaggaaggcgctaagacggctcctggaaagaagagacccatagaatcccccgactcctccacgggcatcggcaagaaaggccagcagcccgctaaaaagaagctcaactttgggcagactggcgactcagagtcagtgcccgacccccaacctctcggagaacctcccgccgcgccctcaggtctgggatctggtacaatggctgcaggcggtggcgcaccaatggcagacaataacgaaggcgccgacggagtgggtaatgcctccggaaattggcattgcgattccacatggctgggcgacagagtcatcaccaccagcacccgcacctgggccctgcccacctacaacaaccacctctacaagcagatatcaagtcagagcggggctaccaacgacaaccacttcttcggctacagcaccccctggggctattttgacttcaacagattccactgccacttctcaccacgtgactggcagcgactcatcaacaacaactggggattccggcccagaaagctgcggttcaagttgttcaacatccaggtcaaggaggtcacgacgaacgacggcgttacgaccatcgctaataaccttaccagcacgattcaggtcttctcggactcggagtaccaactgccgtacgtcctcggctctgcgcaccagggctgcctccctccgttccctgcggacgtgttcatgattcctcagtacggatatctgactctaaacaacggcagtcagtctgtgggacgttcctccttctactgcctggagtactttccttctcagatgctgagaacgggcaataactttgaattcagctacacctttgaggaagtgcctttccacagcagctatgcgcacagccagagcctggaccggctgatgaatcccctcatcgaccagtacctgtactacctggcccggacccagagcactacggggtccacaagggagctgcagttccatcaggctgggcccaacaccatggccgagcaatcaaagaactggctgcccggaccctgttatcggcagcagagactgtcaaaaaacatagacagcaacaacaacagtaactttgcctggaccggggccactaaataccatctgaatggtagaaattcattaaccaacccgggcgtagccatggccaccaacaaggacgacgaggaccagttctttcccatcaacggagtgctggtttttggcgaaacgggggctgccaacaagacaacgctggaaaacgtgctaatgaccagcgaggaggagatcaaaaccaccaatcccgtggctacagaagaatacggtgtggtctccagcaacctgcaatcgtctacggccggaccccagacacagactgtcaacagccagggggctctgcccggcatggtctggcagaaccgggacgtgtacctgcagggtcccatctgggccaaaattcctcacacggacggcaactttcacccgtctcccctgatgggcggatttggactcaaacacccgcctcctcaaattctcatcaaaaacaccccggtacctgctaatcctccagaggtgtttactcctgccaagtttgcctcatttatcacgcagtacagcaccggccaggtcagcgtggagatcgagtgggaactgcagaaagaaaacagcaaacgctggaatccagagattcagtacacctcaaattatgccaagtctaataatgtggaatttgctgtcaacaacgaaggggtttatactgagcctcgccccattggcacccgttacctcacccgtaacctgtaa

SEQ ID NO: 406 - protein, 728 aa, Artificial Sequence; identical to SEQ ID NO: 74
  source: /note="Description of Artificial Sequence: Synthetic polypeptide"

SEQ ID NO: 407 - protein, 728 aa, Artificial Sequence; identical to SEQ ID NO: 166
  source: /note="Description of Artificial Sequence: Synthetic polypeptide"

SEQ ID NO: 408 - protein, 728 aa, Artificial Sequence; identical to SEQ ID NO: 166
  source: /note="Description of Artificial Sequence: Synthetic polypeptide"

SEQ ID NO: 409 - protein, 733 aa, Artificial Sequence
  source: /note="Description of Artificial Sequence: Synthetic polypeptide"
MAADGHLPDWLEDNLSEGIREWWDLKPGAPKPKANQQKQDDGRGLVLPGYKYLGPFNGLDKGEPVNAADAAALEHDKAYDQQLKAGDNPYLRYNHADAEFQERLQEDTSFGGNLGRAVFQAKKRVLEPLGLVEEGAKTAPGKKRPIESPDSSTGIGKKGQQPAKKKLNFGQTGDSESVPDPQPIGEPPAGPSGLGSGTMAAGGGAPMADNNEGADGVGSSSGNWHCDSTWLGDRVITTSTRTWALPTYNNHLYKQISNGTSGGSTNDNTYFGYSTPWGYFDFNRFHCHFSPRDWQRLINNSWGFRPKRLNFKLFNIQVKEVTQNEGTKTIANNLTSTIQVFTDSEYQLPYVLGSAHQGCLPPFPADVFMIPQYGYLTLNNGSQAVGRSSFYCLEYFPSQMLRTGNNFEFSYQFEDVPFHSSYAHSQSLDRLMNPLIDQYLYYLSRTQSTGGTAGTQQLLFSQAGPNNMSAQAKNWLPGPCYRQQRVSTTLSQNNNSNFAWTGATKYHLNGRDSLVNPGVAMATHKDDEERFFPSSGVLMFGKQGAGKDNVDYSSVMLTSEEEIKTTNPVATEQYGVVADNLQQQNAAPIVGAVNSQGALPGMVWQNRDVYLQGPIWAKIPHTDGNFHPSPLMGGFGLKHPPPQILIKNTPVPADPPTTFSQAKLASFITQYSTGQVSVEIEWELQKENSKRWNPEIQYTSNYYKSTNVDFAVNTEGTYSEPRPIGTRYLTRNL

SEQ ID NO: 410 - DNA, 3113 bp, Artificial Sequence
  source: /note="Description of Artificial Sequence: Synthetic polynucleotide"
gaattcgccctttctacggctgcgtcaactggaccaatgagaactttcccttcaacgattgcgtcgacaagatggtgatctggtgggaggagggcaagatgacggccaaggtcgtggagtccgccaaggccattctcggcggcagcaaggtgcgcgtggaccaaaagtgcaagtcgtccgcccagatcgatcccacccccgtgatcgtcacttccaacaccaacatgtgcgccgtgattgacgggaacagcaccaccttcgagcaccagcagccgttacaagaccggatgttcaaatttgaactcacccgccgtctggagcatgactttggcaaggtgacaaagcaggaagtcaaagagttcttccgctgggcgcaggatcacgtgaccgaggtggcgcatgagttctacgtcagaaagggtggagccaacaagagacccgcccccgatgacgcggataaaagcgagcccaagcgggcctgcccctcagtcgcggatccatcgacgtcagacgcggaaggagctccggtggactttgccgacaggtaccaaaacaaatgttctcgtcacgcgggcatgcttcagatgctgcttccctgcaagacatgcgagagaatgaatcagaatttcagcatttgcttcacgcacgggaccagagactgttcagaatgtttccccggcgtgtcagaatctcaaccggtcgtcagaaagaggacgtatcggaaactctgtgccattcatcatctgctggggcgggctcccgagattgcttgctcggcctgcgatctggtcaacgtggacctggatgactgtgtttctgagcaataaatgacttaaaccaggtatggctgccgatggtcatcttccagattggctcgaggacaacctctctgagggcattcgcgagtggtgggacttgaaacctggagccccgaaacccaaagccaaccagcaaaagcaggacgacggccggggtctggtgcttcctggctacaagtacctcggacccttcaacggactcgacaagggggagcccgtcaacgcggcggacgcagcggccctcgagcacgacaaggcctacgaccagcagctcaaagcgggtgacaatccgtacctgcggtataaccacgccgacgccgagtttcaggagcgtcttcaagaagatacgtcttttgggggcaacctcgggcgagcagtcttccaggccaagaagcgggttctcgaacctctcggtctggttgaggaaggcgctaagacggctcctggaaagaagagacccatagaatcccccgactcctccacgggcatcggcaagaaaggccagcagcccgctaaaaagaagctcaactttgggcagactggcgactcagagtcagtgcccgaccctcaaccaatcggagaaccccccgcaggcccctctggtctgggatctggtacaatggctgcaggcggtggcgctccaatggcagacaataacgaaggcgccgacggagtgggtagttcctcaggaaattggcattgcgattccacatagctgggcgacagagtcatcaccaccagcacccgaacctgggccctccccacctacaacaaccacctctacaagcaaatctccaacgggacatcgggaggaagcaccaacgacaacacctacttcggctacagcaccccctgggggtattttgactttaacagattccactgccacttctcaccacgtgactggcagcgactcatcaacaacagctggggattccggcccaagagactcaacttcaagctcttcaacatccaggtcaaggaggtcacgcagaatgaaggcaccaagaccatcgccaataaccttaccagcacgattcaggtctttacggactcggaataccagctcccgtacgtcctcggctctgcgcaccagggctgcctgcctccgttcccggcggacgtcttcatgattcctcagtacgggtacctgactctgaacaacggcagtcaggccgtgggccgttcctccttctactgcctggagtactttccttctcaaatgctgagaacgggcaacaactttgagttcagctaccagtttgaggacgtgccttttcacagcagctacgcgcacagccaaagcctggaccggctgatgaaccccctcatcgaccagtacctgtactacctgtctcggactcagtccacgggaggtaccgcaggaactcagcagttgctattttctcaggccgggcctaataacatgtcggctcaggccaaaaactggctacccgggccctgctaccggcagcaacgcgtctccacgacactgtcgcaaaataacaacagcaactttgcttggaccggtgccaccaagtatcatctgaatggcagagactctctggtaaatcccggtgtcgctatggcaacgcacaaggacgacgaagagcgattttttccatccagcggagtcttgatgtttgggaaacagggagctggaaaagacaacgtggactatagcagcgttatgctaaccagtgaggaagaaatcaaaaccaccaacccagtggccacagaacagtacggcgtggtggccgataacctgcaacagcaaaacgccgctcctattgtaggggccgtcaacagtcaaggagccttacctggcatggtctggcagaaccgggacgtgtacctgcagggtcctatctgggccaagattcctcacacggacggcaactttcatccttcgccgctgatgggaggctttggactgaaacacccgcctcctcagatcctgattaagaatacacctgttcccgcggatcctccaactaccttcagtcaagccaagctggcgtcgttcatcacgcagtacagcaccggacaggtcagcgtggaaattgaatgggagctgcagaaagagaacagcaagcgctggaacccagagattcagtatacttccaactactacaaatctacaaatgtggactttgctgtcaatactgagggtacttattcagagcctcgccccattggcacccgttacctcacccgtaacctgtaattgcctgttaatcaataaaccggttaattcgtttcagttgaactttggtctctgcgaagggcgaattc

SEQ ID NO: 411 - protein, 731 aa, Artificial Sequence
  source: /note="Description of Artificial Sequence: Synthetic polypeptide"
MAADGYLPDWLEDNLSEGIREWWDLKPGAPKPKANQQKQDDGRGLVLPGYKYLGPFNGLDKGEPVNEADAAALEHDKAYDKQLEQGDNPYLKYNHADAEFQERLQEDTSFGGNLGRAVFRAKKRVLEPLGLVEEGAKTAPGKKRPIESPDSSTGIGKKGQQPAKKKLNFGQTGDSESVPDPQPLGEPPAAPSGLGSGTMAAGGGAPMADNNEGADGVGNASGNWHCDSTWLGDRVITTSTRTWALPTYNNHLYKQISSQSGATNDNHFFGYSTPWGYFDFNRFHCHFSPRDWQRLINNNRGFRPRKLRFKLFNIQVKEVTTNDGVTTIANNLTSTIQVFSDSEYQLPYVLGSAHQGCLPPFPADVFMIPQYGYLTLNNGSQSVGRSSFYCLEYFPSQMLRTGNNFEFSYQFEDVPFHSSYAHSQSLDRLMNPLIDQYLYYLSRTQSTGGTAGTQQLLFSQAGPNNMSAQAKNWLPGPCYRQQRVSTTLSQNNNSNFAWTGATKYHLNGRDSLVNPGVAMATHKDDEERFFPSSGVLMFGKQGAGKDNVDYSSVMLTSEEEIKTTNPVATEQYGVVADNLQQQNAAPIVGAVNSQGALPGMAWQNRDVYLQGPIWAKIPHTDGNFHPSPLMGGFGLKHPPPQILIKNTPVPADPPTTFSQAKLASFITQYSTGQVSVEIEWELQKENSKRWNPEIQYTSNYYKSTNVDFAVNTEGTYSEPRPIGTRYLTRNL

SEQ ID NO: 412 - DNA, 3106 bp, Artificial Sequence
  source: /note="Description of Artificial Sequence: Synthetic polynucleotide"
gaattcgcccttctacggctgcgtcaactggaccaatgagaactttcccttcaacgattgcgtcgacaagatggtgatctggtgggaggagggcaagatgacggccaaggtcgtggagtccgccaaggccattctcggcggcagcaaggtgcgcgtggaccaaaagtgcaagtcgtccgcccagatcgaccccacccccgtgatcgtcacctccaacaccaacatgtgcgccgtgattgacgggaacagcaccaccttcgagcaccagcagccgttgcaggaccggatgttcaaatttgaactcacccgccgtctggagcatgactttggcaaggcgacaaagcaggaagtcaaagagttcttccgctgggcgcaggatcacgtgaccgaggtggcgcatgagttctacgtcagaaagggtggagccaacaagagacccgcccccgatgacgcggataaaagcgagcccaagcgggcccgcccctcagtcgcggatccatcgacgtcagacgcggaaggagctccggtggactttgccgacaggtaccaaaacaaatgttctcgtcacgcgggcatgcttcagatgctgtttccctgcaaaacatgcgagagaatgaatcagaatttcaacatttgcttcacgcacgggaccagagactgttcagaatgtttccccggcgtgtcagaatctcaaccggtcgtcagaaagaggacgtatcggaaactctgtgccattcatcatctgctggggcgggctcccgagattgcttgctcggcctgcgatctggtcaacgtggacctggatgactgtgtttctgagcaataaatgacttaaaccaggtatggctgccgatggttatcttccagattggctcgaggacaacctctctgagggcattcgcgagtggtgggacttgaaacctggagccccgaaacccaaagccaaccagcaaaagcaggacgacggccggggtctggtgcttcctggctacaagtacctcggacccttcaacggactcgacaagggagagccggtcaacgaggcagacgccgcggccctcgagcacgacaaggcctacgacaagcagctcgagcagggggacaacccgtacctcaagtacaaccacgccgacgccgagtttcaggagcgtcttcaagaagatacgtcttttgggggcaacctcgggcgagcagtcttccgggccaagaagcgggttctcgaacctctcggtctggttgaggaaggcgctaagacggctcctggaaagaagagacccatagaatcccccgactcctccacgggcatcggcaagaaaggccagcagcccgctaaaaagaagctcaactttgggcagactggcgactcagagtcagtgcccgacccccaacctctcggagaacctcccgccgcgccctcaggtctgggatctggtacaatggctgcaggcggtggcgcaccaatggcagacaataacgaaggcgccgacggagtgggtaatgcctccggaaattggcattgcgattccacatggctgggcgacagagtcatcaccaccagcacccgcacctgggccctgcccacctacaacaaccacctctacaagcagatatcaagtcagagcggggctaccaacgacaaccacttcttcggctacagcaccccctggggctattttgacttcaacagattccactgccacttctcaccacgtgactggcagcgactcatcaacaacaaccggggattccggcccagaaagctgcggttcaagttgttcaacatccaggtcaaggaggtcacgacgaacgacggcgttacgaccatcgctaataaccttaccagcacgattcaggtcttctcggactcggagtaccaactgccgtacgtcctcggctctgcgcaccagggctgcctccctccgttccctgcggacgtgttcatgattcctcagtacggatatctgactctaaacaacggcagtcagtctgtgggacgttcctccttctactgcctggagtactttccttctcagatgctgagaacgggcaataactttgaattcagctaccagtttgaggacgtgccctttcacagcagctacgcgcacagccaaagcctggaccggctgatgaaccccctcatcgaccagtacctgtactacctgtctcggactcagtccacgggaggtaccgcaggaactcagcagttgctattttctcaggccgggcctaataacatgtcggctcaggccaaaaactggctacccgggccctgctaccggcagcaacgcgtctccacgacactgtcgcaaaataacaacagcaactttgcttggaccggtgccaccaagtatcatctgaatggcagagactctctggtaaatcccggtgtcgctatggcaacgcacaaggacgacgaagagcgattttttccatccagcggagtcttgatgtttgggaaacagggagctggaaaagacaacgtggactatagcagcgttatgctaaccagtgaggaagaaatcaaaaccaccaacccagtggccacagaacagtacggcgtggtggccgataacctgcaacagcaaaacgccgctcctattgtaggggccgtcaacagtcaaggagccttacctggcatggcctggcagaaccgggacgtgtacctgcagggtcctatctgggccaagattcctcacacggacggcaactttcatccttcgccgctgatgggaggctttggactgaaacacccgcctcctcagatcctgattaagaatacacctgttcccgcggatcctccaactaccttcagtcaagccaagctggcgtcgttcatcacgcagtacagcaccggacaggtcagcgtggaaattgaatgggagctgcagaaagagaacagcaagcgctggaacccagagattcagtatacttccaactactacaaatctacaaatgtggactttgctgtcaatactgagggtacttattcagagcctcgccccattggcacccgttacctcacccgtaacctgtaattgcctgttaatcaataaaccggttaattcgtttcagttgaactttggtctctgcgaagggcgaattc

SEQ ID NO: 413 - protein, 738 aa, Artificial Sequence
  source: /note="Description of Artificial Sequence: Synthetic polypeptide"
MAADGYLPDWLEDNLSEGIREWWDLKPGAPKPKANQQKQDDGRGLVLPGYKYLGPFNGLDKGEPVNEADAAALEHDKAYDKQLEQGDNPYLKYNHADAEFQERLQEDTSFGGNLGRAVFQAKKRVLEPLGLVEEGAKTAPGKKRPVEPSPQRSPDSSTGIGKTGQQPAKKRLNFGQTGDSESVPDPQPIGEPPAGPSGLGSGTMAAGGGAPMADNNEGADGVGSSSGNWHCDSTWLGDRVITTSTRTWALPTYNNHLYKQISNGTSGGSTNDNTYFGYSTPWGYFDFNRFHCHFSPRDWQRLINNNWGFRPKRLNFKLFNIQVKEVTQNEGTKTIANNLTSTIQVFTDSEYQLPYVLGSAHQGCLPPFPADVFMIPQYGYLTLNNGSQAVGRSSFYCLEYFPSQMLRTGNNFEFSYQFEDVPFHSSYAHSQSLDRLMNPLIDQYLYYLSRTQSTGGTAGTQQLLFSQAGPNNMSAQAKNWLPGPCYRQQRVSTTLSQNNNSNFAWTGATKYHLNGRDSLVNPGVAMATHKDDEERFFPSSGVLMFGKQGAGKDNVDYSSVMLTSEEEIKTTNPVATEQYGVVADNLQQQNAAPIVGAVNSQGALPGMVWQNRDVYLQGPIWAKIPHTDGNFHPSPLMGGFGLKHPPPQILIKNTPVPADPPTTFSQAKLASFITQYSTGQVSVEIEWELQKENSKRWNPEIQYTSNYYKSTNVDFAVNTEGTYSEPRPIGTRYLTRNL

SEQ ID NO: 414 - DNA, 3197 bp, Artificial Sequence
  source: /note="Description of Artificial Sequence: Synthetic polynucleotide"
gaattcgccctttctacggctgcgtcaactggaccaatgagaactttcccttcaacgattgcgtcgacaagatggtgatctggtgggaggagggcaagatgacggccaaggtcgtggagtccgccaaggccattctcggcggcagcaaggtgcgcgtggaccaaaagtgcaagtcgtccgcccagatcgaccccacccccgtgatcgtcacctccaacaccaacatgtgcgccgtgattgacgggaacagcaccaccttcgagcaccagcagccgttacaagaccggatgttcaaatttgaactcacccgccgtctggagcacgactttggcaaggtgacaaagcaggaagtcaaagagttcttccgctgggcgcaggatcacgtgaccgaggtggcgcatgagttctacgtcagaaagggtggagccaacaagagacccgcccccgatgacgcggataaaagcgagcccaagcgggcctgcccctcagtcgcggatccatcgacgtcagacgcggaaggagctccggtggactttgccgacaggtaccaaaacaaatgttctcgtcacgcgggcatgcttcagatgctgtttccctgcaagacatgcgagagaatgaatcagaatttcaacatttgcttcacgcacgggaccagagactgttcagaatgtttccccggcgtgtcagaatctcaaccggtcgtcagaaagaggacgtatcggaaactctgtgccattcatcatctgctggggcgggctcccgagattgcttgctcggcctgcgatctggtcaacgtggacctggatgactgtgtttctgagcaataaatgacttaaaccaggtatggctgccgatggttatcttccagattggctcgaggacaacctctctgagggcattcgcgagtggtgggacttgaaacctggagccccgaaacccaaagccaaccagcaaaagcaggacgacggccggggtctggtgcttcctggctacaagtacctcggacccttcaacggactcgacaagggagagccggtcaacgaggcagacgccgcggccctcgagcacgacaaggcctacgacaagcagctcgagcagggggacaacccgtacctcaagtacaaccacgccgacgccgagtttcaggagcgtcttcaagaagatacgtcttttgggggcaacctcgggcgagcagtcttccaggccaagaagcgggttctcgaacctctcggtctggttgaggaaggcgctaagacggctcctggaaagaagagaccggtagagccatcaccccagcgttctccagactcctctacgggcatcggcaagacaggccagcagcccgcgaaaaagagactcaactttgggcagactggcgactcagagtcagtgcccgaccctcaaccaatcggagaaccccccgcaggcccctctggtctgggatctggtacaatggctgcaggcggtggcgctccaatggcagacaataacgaaggcgccgacggagtgggtagttcctcaggaaattggcattgcgattccacatggctgggcgacagagtcatcaccaccagcacccgaacctgggccctccccacctacaacaaccacctctacaagcaaatctccaacgggacatcgggaggaagcaccaacgacaacacctacttcggctacagcaccccctgggggtattttgactttaacagattccactgccacttctcaccacgtgactggcagcgactcatcaacaacaactggggattccggcccaagagactcaacttcaagctcttcaacatccaggtcaaggaggtcacgcagaatgaaggcaccaagaccatcgccaataaccttaccagcacgattcaggtctttacggactcggaataccagctcccgtacgtcctcggctctgcgcaccagggctgcctgcctccgttcccggcggacgtcttcatgattcctcagtacgggtacctgactctgaacaacggcagtcaggccgtgggccgttcctccttctactgcctggagtactttccttctcaaatgctgagaacgggcaacaactttgagttcagctaccagtttgaggacgtgccttttcacagcagctacgcgcacagccaaagcctggaccggctgatgaaccccctcatcgaccagtacctgtactacctgtctcggactcagtccacgggaggtaccgcaggaactcagcagttgctattttctcaggccgggcctaataacatgtcggctcaggccaaaaactggctacccgggccctgctaccggcagcaacgcgtctccacgacactgtcgcaaaataacaacagcaactttgcttggaccggtgccaccaagtatcatctgaatggcagagactctctggtaaatcccggtgtcgctatggcaacgcacaaggacgacgaagagcgattttttccatccagcggagtcttgatgtttgggaaacagggagctggaaaagacaacgtggactatagcagcgttatgctaaccagtgaggaagaaatcaaaaccaccaacccagtggccacagaacagtacggcgtggtggccgataacctgcaacagcaaaacgccgctcctattgtaggggccgtcaacagtcaaggagccttacctggcatggtctggcagaaccgggacgtgtacctgcagggtcctatctgggccaagattcctcacacggacggcaactttcatccttcgccgctgatgggaggctttggactgaaacacccgcctcctcagatcctgattaagaatacacctgttcccgcggatcctccaactaccttcagtcaagccaagctggcgtcgttcatcacgcagtacagcaccggacaggtcagcgtggaaattgaatgggagctgcagaaagagaacagcaagcgctggaacccagagattcagtatacttccaactactacaaatctacaaatgtggactttgctgtcaatactgagggtacttattcagagcctcgccccattggcacccgttacctcacccgtaacctgtaattgcctgttaatcaataaaccggttaattcgtttcagttgaactttggtctctgcgaagggcgaattcgtttaaacctgcaggactagtccctttagtgagggttaattctgagcttggcgtaatcatgggtcatag

SEQ ID NO: 415 - protein, 735 aa, Artificial Sequence
  source: /note="Description of Artificial Sequence: Synthetic polypeptide"
MAADGYLPDWLEDNLSEGIREWWDLKPGAPKPKANQQKQDDGRGLVLPGYKYLGPFNGLDKGEPVNEADAAALEHDKAYDKQLEQGDNPYLKYNHADAEFQERLQEDTSFGGNLGRAVFQAKKRVLEPLGLVEEGAKTAPGKKRPVEPSPQRSPDSSTGIGKTGQQPAKKRLNFGQTGDSESVPDPQPIGEPPAGPSGLGSGTMAAGGGAPMADNNEGADGVGSSSGNWHCDSTWLGDRVITTSTRTWALPTYNNHLYKQISNGTSGGSTNDNTYFGYSTPWGYFDFNRFHCHFSPRDWQRLINNNWGFRPRKLRFKLFNIQVKEVTTDDGVTTIANNLTSTIQVFSDSEYQLPYVLGSAHQGCLPPFPADVFMIPQYGYLTLNNGSQSVGRSSFYCLEYFPSQMLRTGNNFEFSYTFEEVPFHSSYAHSQSLDRLMNPLIDQYLYYLARTQSTTGSTRELQFHQAGPNTMAEQSKNWLPGPCYRQQRLSKNIDSNNNSNFAWTGATKYHLNGRNSLTNPGVAMATNKDDEDQFFPINGVLVFGKTGAANKTTLENVLMTSEEEIKTTNPVATEEYGVVSSNLQSSTAGPQTQTVNSQGALPGMVWQNRDVYLQGPIWAKIPHTDGNFHPSPLMDGFGLKHPPPQILIKNTPVPANPPEVFTPAKFASFITQYSTGQVSVEIEWELQKENSKRWNPEIQYTSNYAKSNNVEFAVNNEGVYTEPRPIGTRYLTRNL

SEQ ID NO: 416 - DNA, 3276 bp, Artificial Sequence
  source: /note="Description of Artificial Sequence: Synthetic polynucleotide"
gaattcgcccttcgcagagaccaaagttcaactgaaacgaattaaccggtttattgattaacaggcaattacaggttacgggtgaggtaacgggtgccaatggggcgaggctcagtataaaccccttcgttgttgacagcaaattccacattattagacttggcataatttgaggtgtactgaatctctggattccagcgtttgctgttttctttctgcagttcccactcgatctccacgctgacctggccggtgctgtactgcgtgataaatgaggcaaacttggcaggagtaaacacctctggaggattagcaggtaccggggtgtttttgatgagaatttgaggaggcgggtgtttgagtccaaatccgtccatcaggggagacgggtgaaagttgccgtccgtgtgaggaattttggcccagatgggaccctgcaggtacacgtcccggttctgccagaccatgccgggcagagccccctggctgttgacagtctgtgtctggggtccggccgtagacgattgcaggttgctggagaccacaccgtattcttctgtagccacgggattggtggttttgatctcctcctcgctggtcattagcacgttttccagcgttgtcttgttggcagcccccgttttgccaaaaaccagcactccgttgatgggaaagaactggtcctcgtcgtccttgttggtggccatggctacgcccgggttggttaatgaatttctaccattcagatggtatttagtggccccggtccaggcaaagttactgttgttgttgctgtctatgttttttgacagtctctgctgccgataacagggtccgggcagccagttctttgattgctcggccatggtgttgggcccagcctgatggaactgcagctcccttgtggaccccgtagtgctctgggtccgggccaggtagtacaggtactggtcgatgaggggattcatcagccggtccaggctctggctatgcgcatagctgctgtggaaaggcacttcctcaaaggtgtagctgaattcaaagttattgcccgttctcagcatctgagaaggaaagtactccaggcagtagaaggaggaacgtcccacagactgactgccgttgtttagagtcagatatccgtactgaggaatcatgaacacgtccgcagggaacggagggaggcagccctggtgcgcagagccgaggacgtacggcagttggtactccgagtccgagaagacctgaatcgtgctggtaaggttattagcgatggtcgtaacgccgtcgtccgtcgtgacctccttgacctggatgttgaacaacttgaaccgcagctttctgggccggaatccccagttgttgttgatgagtcgctgccagtcacgtggtgagaagtggcagtggaatctgttaaagtcaaaatacccccagggggtgctgtagccgaagtaggtgttgtcgttggtgcttcctcccgatgtcccgttggagatttgcttgtagaggtggttgttgtaggtggggagggcccaggttcgggtgctggtggtgatgactctgtcgcccagccatgtggaatcgcaatgccaatttcctgaggaactacccactccgtcggcgccttcgttattgtctgccattggagcgccaccgcctgcagccattgtaccagatcccagaccagaggggcctgcggggggttctccgattggttgagggtcgggcactgactctgagtcgccagtctgcccaaagttgagtctctttttcgcgggctgctggcctgtcttgccgatgcccgtagaggagtctggagaacgctggggtgatggctctaccggtctcttctttccaggagccgtcttagcgccttcctcaaccagaccgagaggttcgagaacccgcttcttggcctggaagactgctcgcccgaggttgcccccaaaagacgtatcttcttgaagacgctcctgaaactcggcgtcggcgtggttgtacttgaggtacgggttgtccccctgctcgagctgcttgtcgtaggccttgtcgtgctcgagggccgcggcgtctgcctcgttgaccggctctcccttgtcgagtccgttgaagggtccgaggtacttgtagccaggaagcaccagaccccggccgtcgtcctgcttttgctggttggctttgggtttcggggctccaggtttcaagtcccaccactcgcgaatgccctcagagaggttgtcctcgagccaatctggaagataaccatcggcagccatacctggtttaagtcatttattgctcagaaacacagtcatccaggtccacgttgaccagatcgcaggccgagcaagcaatctcgggagcccgccccagcagatgatgaatggcacagagtttccgatacgtcctctttctgacgaccggttgagattctgacacgccggggaaacattctgaacagtctctggtcccgtgcgtgaagcaaatgttgaaattctgattcattctctcgcatgtcttgcagggaaacagcatctgaagcatgcccgcgtgacgagaacacttgttttggtacctgtcggcaaagtccaccggagctccttccgcgtctgacgtcgatggatgcaaaatgtcgcaaaagcactcacgtgacagctaatacaggaccactcccctatgacgtgatttacgtcagcgctatgcccgcgtgacgagaacatttgttttggtacctgtcggcaaagtccaccggagctccttccgcgtctgacgtcgatggatccgcgactgaggggcaggcccgcttgggctcgcttttatccgcgtcatcgggggcgggtctcttgttggctccaccctttctgacgtagaactcatgcgccacctcggtcacgtgatcctgcgcccagcggaagaactctttgacttcctgctttgtcaccttgccaaagtcatgctccagacggcgggtgagttcaaatttgaacatccggtcctgcaacggctgctggtgctcgaaggtggtgctgttcccgtcaatcacggcgcacatgttggtgttggaagtgacgatcacgggggtgggatcgatctgggcggaagacttgcacttttggtccacgcgcaccttgctgccgccgagaatggccttggcggactccacgaccttggccgtcatcttgccctcctcccaccagatcaccatcttgtcgacgcaatcgttgaagggaaagttctcattggtccagttgacgcagccgtagaaagggcgaattc

SEQ ID NO: 417 - protein, 738 aa, Artificial Sequence; identical to SEQ ID NO: 82
  source: /note="Description of Artificial Sequence: Synthetic polypeptide"

SEQ ID NO: 418 - protein, 738 aa, Artificial Sequence
  source: /note="Description of Artificial Sequence: Synthetic polypeptide"
MAADGYLPDWLEDNLSEGIREWWDLKPGAPKPKANQQKQDDGRGLVLPGYKYLGPFNGLDKGEPVNAADAAALEHDKAYDQQLKAGDNPYLRYNHADAEFQERLQEDTSFGGNLGRAVFQAKKRVLEPLGLVEEGAKTAPGKKRPVEPSPQRSPDSSTGIGKKGHQPARKRLNFGQTGDSESVPDPQPIGEPPAGPSGLGSGTMAAGGGAPMADNNEGADGVGSSSGNWHCDSTWLGDRVITTSTRTWALPTYNNHLYKQISNGTSGGSTNDNTYFGYSTPWGYFDFNRFHCHFSPRDWQRLINNNWGFRPKRLNFKLFNIQVKEVTQNEGTKTIANNLTSTIQVFTDSEYQLPYVPGSAHQGCLPPFPADVFMIPQYGYLTLNNGSQAVGRSSFYCLEYFPSQMLRTGNNFEFSYTFEDVPFHSSYAHSQSLDRLMNPLIDQYLYYLSRTQSTGGTQGTQQLLFSQAGPANMSAQAKNWLPGPCYRQQRVSTTLSQNNNSNFAWTGATKYHLNGRDSLVNPGVAMATHKDDEERFFPSSGVLMFGKQGAGKDNVDYSSVMLTSEEEIKTTNPVATEQYGVVADNLQQTNGAPIVGTVNSQGALPGMVWQNRDVYLQGPIWAKIPHTDGNFHPSPLMGGFGLKHPPPQILIKNTPVPADPPTTFSQAKLASFITQYSTGQVSVEIEWELQKENSKRWNPEIQYTSNYYKSTNVDFAVNTEGTYSEPRPIGTRYLTRNL

SEQ ID NO: 419 - protein, 738 aa, Artificial Sequence; identical to SEQ ID NO: 80
  source: /note="Description of Artificial Sequence: Synthetic polypeptide"

SEQ ID NO: 420 - protein, 728 aa, Artificial Sequence
  source: /note="Description of Artificial Sequence: Synthetic polypeptide"
MAADGYLPDWLEDNLSEGIREWWDLKPGAPKPKANQQKQDDGRGLVLPGYKYLGPFNGLDKGEPVNEADAAALEHDKAYDKQLEQGDNPYLKYNHADAEFQERLQEDTSFGGNLGRAVFQAKKRVLEPLGLVEEGAKTAPGKKRPIESPDSSTGIGRKGQQPAKKKLNFGQTGDSESVPDPQPIGEPPAGPSGLGSGTMAAGGGAPMADNNEGADGVGNASGNWHCDSTWLGDRVITTSTRTWALPTYNNHLYKQISSQSGATNDNHFFGYSTPWGYFDFNRFHCHFSPRDWQRLINNNWGFRPRKLRFKLFNIQVKEVTTNDGVTTIANNLTSTIQVFSDSEYQLPYVLGSAHQGCLPPFPADVFMIPQYGYLTLNNGSQSVGRSSFYCLEYFPSQMLRTGNNFEFSYTFEEVPFHSSYAHSQSLDRLMNPLIDQYLYYLARTQSTTGSTRELQFHQAGPNTMAEQSKNWLPGPCYRQQRLSKNIDSNNNSNFAWTGATKYHLNGRNSLTNPGVAMATNKDDEDQFFPINGVLVFGKTGAANKTTLENVLMTSEEEIKTTNPVATEEYGVVSSNLQSSTAGPQTQTVNSQGALPGMVWQNRDVYLQGPIWAKIPHTDGNFHPSPLMGGFGLKHPPPQILIKNTPVPANPPEVFTPAKFASFITQYSTGQVSVEIEWELQKENSKRWNPEIQYTSNYAKSNNVEFAVNNEGVYTEPRPIGTRYLTRNL

SEQ ID NO: 421 - DNA, 2489 bp, Artificial Sequence
  source: /note="Description of Artificial Sequence: Synthetic polynucleotide"
gaattcgccctttctacggctgcgtcaactggaccaatgagaactttcccttcaacgattgcgtcgacaagatggtgatctggtgggaggagggcaagatgacggccaaggtcgtgaagtccgccaaggccattcatcatctgctggggcgggctcccgagattgcttgctcggcctgcgatctggtcaacgtggacctggatgactgtgtttctgagcaataaatgacttaaaccaggtatggctgccgatggttatcttccagattggctcgaggacaacctctctgagggcattcgcgagtggtgggacttgaaacctggagccccgaaacccaaagccaaccagcaaaagcaggacgacggccggggtctggtgcttcctggctacaagtacctcggacccttcaacggactcgacaagggagagccggtcaacgaggcagacgccgcggccctcgagcacgacaaggcctacgacaagcagctcgagcagggggacaacccgtacctcaagtacaaccacgccgacgccgagtttcaggagcgtcttcaagaagatacgtcttttgggggcaacctcgggcgagcagtcttccaggccaagaagcgggttctcgaacctctcggtctggttgaggaaggcgctaagacggctcctggaaagaagagacccatagaatcccccgactcctccacgggcatcggcaggaaaggccagcagcccgctaaaaagaagctcaactttgggcagactggcgactcagagtcagtgcccgaccctcaaccaatcggagaaccccccgcaggcccctctggtctgggatctggtacaatggctgcaggcggtggcgctccaatggcagacaataacgaaggcgccgacggagtgggtaatgcctccggaaattggcattgcgattccacatggctgggcgacagagtcatcaccaccagcacccgcacctgggccctgcccacctacaacaaccacctctacaagcagatatcaagtcagagcggggctaccaacgacaaccacttcttcggctacagcaccccctggggctattttgacttcaacagattccactgccacttctcaccacgtgactggcagcgactcatcaacaacaactggggattccggcccagaaagctgcggttcaagttgttcaacatccaggtcaaggaggtcacgacgaacgacggcgttacgaccatcgccaataaccttaccagcacgattcaggtcttctcggactcggagtaccaactgccgtacgtcctcggctctgcgcaccagggctgcctccctccgttccctgcggacgtgttcatgattcctcagtacggatatctgactctaaacaacggcagtcagtctgtgggacgttcctccttctactgcctggagtactttccttctcagatgctgagaacgggcaataactttgaattcagctacacctttgaggaagtgcctttccacagcagctatgcgcacagccagagcctggaccggctgatgaatcccctcatcgaccagtacctgtactacctggcccggacccagagcactacggggtccacaagggagctgcagttccatcaggctgggcccaacaccatggccgagcaatcaaagaactggctgcccggaccctgttatcggcagcagagactgtcaaaaaacatagacagcaacaacaacagtaactttgcctggaccggggccactaaataccatctgaatggtagaaattcattaaccaacccgggcgtagccatggccaccaacaaggacgacgaggaccagttctttcccatcaacggagtgctggtttttggcaaaacgggggctgccaacaagacaacgctggaaaacgtgctaatgaccagcgaggaggagatcaaaaccaccaatcccgtggctacagaagaatacggtgtggtctccagcaacctgcaatcgtctacggccggaccccagacacagactgtcaacagccagggggctctgcccggcatggtctggcagaaccgggacgtgtacctgcagggtcccatctgggccaaaattcctcacacggacggcaactttcacccgtctcccctgatgggcggatttggactcaaacacccgcctcctcaaattctcatcaaaaacaccccggtacctgctaatcctccagaggtgtttactcctgccaagtttgcctcatttatcacgcagtacagcaccggccaggtcagcgtggagatcgagtgggaactgcagaaagaaaacagcaaacgctggaatccagagattcagtacacctcaaattatgccaagtctaataatgtggaatttgctgtcaacaacgaaggggtttatactgagcctcgccccattggcacccgttacctcacccgtaacctgtaattgcctgttaatcaataaaccggttaattcgtttcagttgaactttggtcaagggcgaattc

SEQ ID NO: 422 - protein, 728 aa, Artificial Sequence
  source: /note="Description of Artificial Sequence: Synthetic polypeptide"
MAADGYLPDWLEDNLSEGIREWWDLKPGAPKPKANQQKQDDGRGLVLPGYKYLGPFNGLDKGEPVNAADAAALEHDKAYDQQLKAGDNPYLRYNHADAEFQERLQEDTSFGGNLGRAVFQAKKRVLEPLGLVEEGAKTAPGKKRPIESPDSSTGIGKKGQQPAKKKLNFGQTGDSESVPDPQPIGEPPAGPSGLGSGTMAAGGGAPMADNNEGADGVGNASGNWHCDSTWLGDRVITTSTRTWALPTYNNHLYKQISSQSGATNDNHFFGYSTPWGYFDFNRFHCHFSPRDWQRLINNNWGFRPRKLRFKLFNIQVKEVTTNDGVTTIANNLTSTIQVFSDSEYQLPYVLGSAHQGCLPPFPADVFMIPQYGYLTLNNGSQSVGRSSFYCLEYFPSQMLRTGNNFEFSYTFEEVPFHSSYAHSQSLDRLMNPLIDQYLYYLARTQSTTGSTRELQFHQAGPNTMAEQSKNWLPGPCYRRQRLSKDIDSNNNSNFAWTGATKYHLNGRNSLTNPGVAMATNKDDEDQFFPINGVLVFGKTGAANKTTLENVLMTSEEEIKTTNPVATEEYGVVSSNLQSSTAGPQTQTVNSQGALPGMVWQNRDVYLQGPIWAKIPHTDGNFHPSPLMGGFGLKHPPPQILIKNTPVPANPPEVFTPAKFASFITQYSTGQVSVEIEWELQKENSKRWNPEIQYTSNYAKSNNVEFAVNNEGVYTEPRPIGTRYLTRNL

SEQ ID NO: 423 - DNA, 3098 bp, Artificial Sequence
  source: /note="Description of Artificial Sequence: Synthetic polynucleotide"
gaattcgccctttctacggctgcgtcaactggaccaatgagaactttcccttcaacgattgcgtcgacaagatggtgatctggtgggaggagggcaagatgacggccaaggtcgtggagtccgccaaggccattctcggcggcagcaaggtgcgcgtggaccaaaagtgcaagtcttccgcccagatcgatcccacccccgtgatcgtcacttccaacaccaacatgtgcgccgtgattgacgggaacagcaccaccttcgagcaccagcagccgttacaagaccggatgttcaaatttgaactcacccgccgtctggagcacgactttggcaaggtgacaaagcaggaagtcaaagagttcttccgctgggcgcaggatcacgtgaccgaggtggcgcatgagttctacgtcagaaagggtggagccaacaagagacccgcccccgatgacgcggataaaagcgagcccaagcgggcctgcccctcagtcgcggatccatcgacgtcagacgcggaaggagctccggtggactttgccgacaggtaccaaaacaaatgttctcgtcacgcgggcatgcttcagatgctgtttccctgcaagacatgcgagagaatgaatcagaatttcaacatttgcttcacgcacgggaccggagactgttcagaatgtttccccggcgtgtcagaatctcaaccggtcgtcagaaagaggacgtatcggaaactctgtgccattcatcatctgctggggcgggctcccgagattgcttgctcggcctgcgatctggtcaacgtggacctggatgactgtgtttctgagcaataaatgacttaaaccaggtatggctgccgatggttatcttccagattggctcgaggacaacctctctgagggcattcgcgagtggtgggacttgaaacctggagccccgaaacccaaagccaaccagcaaaagcaggacgacggccggggtctggtgcttcctggctacaagtacctcggacccttcaacggactcgacaagggagagccggtcaacgcggcggacgcagcggccctcgagcacgacaaggcctacgaccagcagctcaaagcgggtgacaatccgtacctgcggtataaccacgccgacgccgagtttcaggagcgtcttcaagaagatacgtcttttgggggcaacctcgggcgagcagtcttccaggccaagaagcgggttctcgaacctctcggtctggttgaggaaggcgctaagacggctcctggaaagaagagacccatagaatcccccgactcctccacgggcatcggcaagaaaggccagcagcccgctaaaaagaagctcaactttgggcagactggcgactcagagtcagtgcccgaccctcaaccaatcggagaaccccccgcaggcccctctggtctgggatctggtacaatggctgcaggcggtggcgctccaatggcagacaataacgaaggcgccgacggagtgggtaatgcctccggaaattggcattgcgattccacatggctgggcgacagagtcatcaccaccagcacccgcacctgggccctgcccacctacaacaaccacctctacaagcagatatcaagtcagagcggggctaccaacgacaaccacttcttcggctacagcaccccctggggctattttgacttcaacagattccactgccacttctcaccacgtgactggcagcgactcatcaacaacaactggggattccggcccagaaagctgcggttcaagttgttcaacatccaggtcaaggaggtcacgacgaacgacggcgttacgaccatcgctaataaccttaccagcacgattcaggtcttctcggactcggagtaccaactgccgtacgtcctcggctctgcgcaccagggctgcctccctccgttccctgcggacgtgttcatgattcctcagtacggatatctgactctaaacaacggcagtcagtctgtgggacgttcctccttctactgcctggagtactttccttctcagatgctgagaacgggcaataactttgaattcagctacacctttgaggaagtgcctttccacagcagctatgcgcacagccagagcctggaccggctgatgaatcccctcatcgaccagtacctgtactacctggcccggacccagagcactacggggtccacaagggagctgcagttccatcaggctgggcccaacaccatggccgagcaatcaaagaactggctgcccggaccctgttatcggcggcagagactgtcaaaagacatagacagcaacaacaacagtaactttgcctggaccggggccactaaataccatctgaatggtagaaattcattaaccaacccgggcgtagccatggccaccaacaaggacgacgaggaccagttctttcccatcaacggagtgctggtttttggcaaaacgggggctgccaacaagacaacgctggaaaacgtgctaatgaccagcgaggaggagatcaaaaccaccaatcccgtggctacagaagaatacggtgtggtctccagcaacctgcaatcgtctacggccggaccccagacacagactgtcaacagccagggggctctgcccggcatggtctggcagaaccgggacgtgtacctgcagggtcccatctgggccaaaattcctcacacggacggcaactttcacccgtctcccctgatgggcggatttggactcaaacacccgcctcctcaaattctcatcaaaaacaccccggtacctgctaatcctccagaggtgtttactcctgccaagtttgcctcatttatcacgcagtacagcaccggccaggtcagcgtggagatcgagtgggaactgcagaaagagaacagcaaacgctggaatccagagattcagtacacctcaaattatgccaagtctaataatgtggaatttgctgtcaacaacgaaggggtttatactgagcctcgccccattggcacccgttacctcacccgtaacctgtaattacttgttaatcaataaaccggttgattcgtttcagttgaactttggtctctgcgaagggcgaattc

SEQ ID NO: 424 - protein, 685 aa, Artificial Sequence
  source: /note="Description of Artificial Sequence: Synthetic polypeptide"
MAADGYLPDWLEDNLSEGIREWWDLKPGAPKPKANQQKQDDGRGLVLPGYKYLGPFNGLDKGEPVNEADAAALEHDKAYDKQLEQGDNPYLKYNHADAEFQERLQEDTSFGGNLGRAVFQAKKRVLEPLGLVEEGAKTAPGKKRPVEPSPQRSPDSSTGIGKTGQQPAKKRLNFGQTGDSESVPDPQPIGEPPAGPSGLGSGTMAAGGGAPMADNNEGADGVGSSSGNWHCDSTWLGDRVITTSTRTWALPTYNNHLYKQISNGTSGGSTNDNTYFGYSTPWGYFDFNRFHCHFSPRDWQRLINNNWGFRPKRLNFKLFNIQVKEVTQNEGTKTIANNLTSTIQVFTDSEYQLPYVLGSAHQGCLPPFPADVFMIPQYGYLTLNNGSQAVGRSSFYCLEYFPSQMLRTGNNFEFSYQFEDVPFHSSYAHSQSLDRLTNPLIDQYLYYLARTQSTTGSTRGLQFHQAGPNTMAEQSKNWLPGPCYRQQRLSKNIDSNNNSNFAWTGATKYHLNGRNSLTNPGVAMATNKDDEDQFFPINGVLVFGKTGAANKTTLENVLMTSEEEIKTTNPVATEEYGVVSSNLQSSTAGPQTQTVNSQGALPGMVWQNRDVYLQGPIWAKIPHTDGNFHPSPLMGGFGLKHPPPQILIKYTSNYYKSTNVDFAVNTEGTYSEPRPIGTRYLTRNL

SEQ ID NO: 425 - DNA, 2969 bp, Artificial Sequence
  source: /note="Description of Artificial Sequence: Synthetic polynucleotide"
gaattcgccctttctacggctgcgtcaactggaccaatgagaactttcccttcaacgattgcgtcgacaagatggtgatctggtgggaggagggcaagatgacggccaaggtcgtggagtccgccaaggccattctcggcggcagcaaggtgcgcgtggaccaaaagtgcaagtcgtccgcccagatcgaccccacccccgtgatcgtcacctccaacaccaacatgtgcgccgtgattgacgggaacagcaccaccttcgagcaccagcagccgttacaagaccggatgttcaaatttgaactcacccgccgtctggagcacgactttggcaaggtgacaaagcaggaagtcaaagagttcttccgctgggcgcaggatcacgtgaccgaggtggcgcatgagttctacgtcagaaagggtggagccaacaagagacccgcccccgatgacgcggataaaagcgagcccaagcgggcctgcccctcagtcgcggatccatcgacgtcagacgcggaaggagctccggtggactttgccgacaggtaccaaaacaaatgttctcgtcacgcgggcatgcttcagatgctgtttccctgcaagacatgcgagagaatgaatcagaatttcaacatttgcttcacgcacgggaccagagactgttcagaatgtttccccggcgtgtcagaatctcaaccggtcgtcagaaagaggacgtatcggaaactctgtgccattcatcatctgctggggcgggctcccgagattgcttgctcggcctgcgatctggtcaacgtggacctggatgactgtgtttctgagcaataaatgacttaaaccaggtatggctgccgatggttatcttccagattggctcgaggacaacctctctgagggcatccgcgagtggtgggacttgaaacctggagccccgaaacccaaagccaaccagcaaaagcaggacgacggccggggtctggtgcttcctggctacaagtacctcggacccttcaacggactcgacaagggagagccggtcaacgaggcagacgccgcggccctcgagcacgacaaggcctacgacaagcagctcgagcagggggacaacccgtacctcaagtacaaccacgccgacgccgagtttcaggagcgtcttcaagaagatacgtcttttgggggcaacctcgggcgagcagtcttccaggccaagaagcgggttctcgaacctctcggtctggttgaggaaggcgctaagacggctcctggaaagaagagaccggtagagccatcaccccagcgttctccagactcctctacgggcatcggcaagacaggccagcagcccgcgaaaaagagactcaactttgggcagactggcgactcagagtcagtgcccgaccctcaaccaatcggagaaccccccgcaggcccctctggtctgggatctggtacaatggctgcaggcggtggcgctccaatggcagacaataacgaaggcgccgacggagtgggtagttcctcaggaaattggcattgcgattccacatggctgggcgacagagtcatcaccaccagcacccgaacctgggccctccccacctacaacaaccacctctacaagcaaatctccaacgggacatcgggaggaagcaccaacgacaacacctacttcggctacagcaccccctgggggtattttgactttaacagattccactgccacttctcaccacgtgactggcagcgactcatcaacaacaactggggattccggcccaagagactcaacttcaagctcttcaacatccaggtcaaggaggtcacgcagaatgaaggcaccaagaccatcgccaataaccttaccagcacgattcaggtctttacggactcggaataccagctcccgtacgtcctcggctctgcgcaccagggctgcctgcctccgttcccggcggacgtcttcatgattcctcagtacgggtacctgactctgaacaacggcagtcaggccgtgggccgttcctccttctactgcctggagtactttccttctcaaatgctgagaacgggcaacaactttgagttcagctaccagtttgaggacgtgccttttcacagcagctacgcgcacagccaaagcctggaccggctgacgaaccccctcatcgaccagtacctgtactacctggcccggacccagagcactacggggtccacaagggggctgcagttccatcaggctgggcccaacaccatggccgagcaatcaaagaactggctgcccggaccctgttatcggcagcagagactgtcaaaaaacatagacagcaacaacaacagtaactttgcctggaccggggccactaaataccatctgaatggtagaaattcattaaccaacccgggcgtagccatggccaccaacaaggacgacgaggaccagttctttcccatcaacggagtgctggtttttggcaaaacgggggctgccaacaagacaacgctggaaaacgtgctaatgaccagcgaggaggagatcaaaaccaccaatcccgtggctacagaagaatacggtgtggtctccagcaacctgcaatcgtctacggccggaccccagacacagactgtcaacagccagggggctctgcccggcatggtctggcagaaccgggacgtgtacctgcagggtcccatctgggccaaaattcctcacacggacggcaactttcacccgtctcccctgatgggcggatttggactcaaacacccgcctcctcaaattctcatcaagtatacttccaactactacaaatctacaaatgtggactttgctgtcaatactgagggtacttattcagagcctcgccccattggcacccgttacctcacccgtaacctgtaattgcctgttaatcaataaaccggttaattcgtttcagttgaactttggtctctgcgaagggcgaattc

SEQ ID NO: 426 - protein, 733 aa, Artificial Sequence
  source: /note="Description of Artificial Sequence: Synthetic polypeptide"
MAADGYLPDWLEDNLSEGIREWWDLKPGAPKPKANQQKQDDGRGLVLPGYKYLGPFNGLDKGEPVNAADAAALEHDKAYDQQLKAGDNPYLRYNHADAEFQERLQEDTSFGGNLGRAVFQAKKRVLEPLGLVEEGAKTAPGKKRPIESPDSSTGIGKKGQQPAKKKLNFGQTGDSESVPDPQPIGEPPAGPSGLGSGTMAAGGGAPMADNNEGADGVGSSSGNWHCDSTWLGDRVITTSTRTWALPTYNNHLYKQISNGTSGGSTNDNTYFGYSTPWGYFDFNRFHCHFSPRDWQRLINNNWGFRPKRLNFKLFNIQVKEVTQNEGTKTIANNLTSTIQVFTDSEYQLPYVLGSAHQGCLPPFPADVFMIPQYGYLTLNNGSQAVGRSSFYCLEYFPSQMLRTGNNFEFSYQFEDVPFHSSYAHSQSLDRLMNPLIDQYLYYLSRTQSTGGTAGTQQLLFSQAGPNNMSAQAKNWLPGPCYRQQRVSTTVSQNNNSNFAWTGATKYHLNGRDSLVNPGVAMATHKGDEERFFPSSGVLMFGKQGAGKDNVDYSSVMLTSEEEIKTTNPVATEQYGVVADNLQQQNAAPIVGAVNSQGALPGMVWQNRDVYLQGPIWAKIPHTDGNFHPSPLMGGFGLKHPPPQILIKNTPVPADPPTTFSQAKLASFITQYSTGQVSVEIEWELQKENSKRWNPEIQYTSNYYKSTNVDFAVNTEGTYSEPRPIGTRYLTRSL

SEQ ID NO: 427 - DNA, 3113 bp, Artificial Sequence
  source: /note="Description of Artificial Sequence: Synthetic polynucleotide"
gaattcgccctttctacggctgcgtcaactggaccaatgagaactttcccttcaacgattgcgtcgacaagatggtgatctggtgggaggagggcaagatgacggccaaggtcgtggagtccgccaaggccattctcggcggcagcaaggtgcgcgtggaccaaaagtgcaagtcgtccgcccagatcgatcccacccccgtgatcgtcacttccaacaccaacatgtgcgccgtgattgacgggaacagcaccaccttcgagcaccagcagccgttacaagaccggatgttcaaatttgaactcacccgccgtctggagcatgactttggcaaggtgacaaagcaggaagtcaaagagttcttccgctgggcgcaggatcacgtgaccgaggtggcgcatgagttctacgtcagaaagggtggagccaacaagagacccgcccccgatgacgcggataaaagcgagcccaagcgggcctgcccctcagtcgcggatccatcgacgtcagacgcggaaggagctccggtggactttgccgacaggtaccaaaacaaatgttctcgtcacgcgggcatgcttcagatgctgtttccctgcaagacatgcgagagaatgaatcagaatttcaacatttgcttcacgcacgggaccagagactgttcagaatgtttccccggcgtgtcagaatctcaaccggtcgtcagaaagaggacgtatcggaaactctgtgccattcatcatctgctggggcgggctcccgagattgcttgctcggcctgcgatctggtcaacgtggacctggatgactgtgtttctgagcaataaatgacttaaaccaggtatggctgccgatggttatcttccagattggctcgaggacaacctctctgagggcattcgcgagtggtgggacttgaaacctggagccccgaaacccaaagccaaccagcaaaagcaggacgacggccggggtctggtgcttcctggctacaagtacctcggacccttcaacggactcgacaagggggagcccgtcaacgcggcggacgcagcggccctcgagcacgacaaggcctacgaccagcagctcaaagcgggtgacaatccgtacctgcggtataaccacgccgacgccgagtttcaggagcgtcttcaagaagatacgtcttttgggggcaacctcgggcgagcagtcttccaggccaagaagcgggttctcgaacctctcggtctggttgaggaaggcgctaagacggctcctggaaagaagagacccatagaatcccccgactcctccacgggcatcggcaagaaaggccagcagcccgctaaaaagaagctcaactttgggcagactggcgactcagagtcagtgcccgaccctcaaccaatcggagaaccccccgcaggcccctctggtctgggatctggtacaatggctgcaggcggtggcgctccaatggcagacaataacgaaggcgccgacggagtgggtagttcctcaggaaattggcattgcgattccacatggctgggcgacagagtcatcaccaccagcacccgaacctgggccctccccacctacaacaaccacctctacaagcaaatctccaacgggacatcgggaggaagcaccaacgacaacacctacttcggctacagcaccccctgggggtattttgactttaacagattccactgccacttctcaccacgtgactggcagcgactcatcaacaacaactggggattccggcccaagagactcaacttcaagctcttcaacatccaggtcaaggaggtcacgcagaatgaaggcaccaagaccatcgccaataaccttaccagcacgattcaggtctttacggactcggaataccagctcccgtacgtcctcggctctgcgcaccagggctgcctgcctccgttcccggcggacgtcttcatgattcctcagtacgggtacctgactctgaacaacggcagtcaggccgtgggccgttcctccttctactgcctggagtactttccttctcaaatgctgagaacgggcaacaactttgagttcagctaccagtttgaggacgtgccttttcacagcagctatgcgcacagccaaagcctggaccggctgatgaaccccctcatcgaccagtacctgtactacctgtctcggactcagtccacgggaggtaccgcaggaactcagcagttgctattttctcaggccgggcctaataacatgtcggctcaggccaaaaactggctacccgggccctgctaccggcagcaacgcgtctccacgacagtgtcgcaaaataacaacagcaactttgcttggaccggtgccaccaagtatcatctgaatggcagagactctctggtaaatcccggtgtcgctatggcaacgcacaagggcgacgaagagcgattttttccatccagcggagtcttgatgtttgggaaacagggagctggaaaagacaacgtggactatagcagcgttatgctaaccagtgaggaagaaatcaaaaccaccaacccagtggccacagaacagtacggcgtggtggccgataacctgcaacagcaaaacgccgctcctattgtaggggccgtcaacagtcaaggagccttacctggcatggtctggcagaaccgggacgtgtacctgcagggtcctatctgggccaagattcctcacacggacggcaactttcatccttcgccgctgatgggaggctttggactgaaacacccgcctcctcagatcctgattaagaatacacctgttcccgcggatcctccaactaccttcagtcaagccaagctggcgtcgttcatcacgcagtacagcaccggacaggtcagcgtggaaattgaatgggagctgcagaaagagaacagcaagcgctggaacccagagattcagtatacttccaactactacaaatctacaaatgtggactttgctgtcaatactgagggtacttattcagagcctcgccccattggcacccgttacctcacccgtagcctgtaattgcctgttaatcaataaaccggttgattcgtttcagttgaactttggtctctgcgaagggcgaattc

SEQ ID NO: 428 - protein, 738 aa, Artificial Sequence
  source: /note="Description of Artificial Sequence: Synthetic polypeptide"
MAADGYLPDWLEDNLSEGIREWWDLKPGAPKPKANQQKQDDGRGLVLPGYKYLGPFNGLDKGEPVNAADAAALEHDKAYDQQLKAGDNPYLRYNHADAEFQERLQEDTSFGGNLGRAVFQAKKRVLEPLGLVEEGAKTAPGKKRPVEPSPQRSPDSSTGIGKTGQQPAKKRLNFGQTGDSESVPDPQPIGEPPAGPSGLGSGTMAAGGGAPMADNNEGADGVGSSSGNWHCDSTWLGDRVITTSTRTWALPTYNNHLYKQISNGTSGGSTNDNTYFGYSTPWGYFDFNRFHCHFSPRDWQRLINNNWGFRPKRLNFKLFNIQVKEVTQNEGTKTIANNLTSTIQVFTDSEYQLPYVLGSAHQGCPPPFPADVFMIPQYGYLTLNNGSQAVGRSSFYCLEYFPSQMRRTGNNFEFSYQFEDVPFHSSYAHSQSLDRLMNPLIDQYLYYLSRTQSTGGTAGTQQLLFSQAGPNNMSAQAKNWLPGPCYRQQRVSTTLSQNNNSNFAWTGATKYHLNGRDSLVNPGVAMATHKDDEERFFPSSGVLMFGKQGAGKDNVDYSSVMLTSEEEIKTTNPVATEQYGVVADNLQQQNAAPIVGAVNSQGALPGMVWQNRDVYLQGPIWAKIPHTDGNFHPSPLMGGFGLKHPPPQILIKNTPVPADPPTTFSQAKLASFITQYSTGQVSVEIEWELQKENSKRWNPEIQYTSNYYKSTNVDFAVNTEGTYSEPRPIGTRYLTRNL

SEQ ID NO: 429 - DNA, 3128 bp, Artificial Sequence
  source: /note="Description of Artificial Sequence: Synthetic polynucleotide"
gaattcgccctttctacggctgcgtcaactggaccaatgagaactttcccttcaacgattgcgtcgacaagatggtgatctggtgggaggagggcaagatgacggccaaggtcgtggagtccgccaaggccattctcggcggcagcaaggtgcgcgtggaccaaaagtgcaagtcgtccgcccagatcgaccccacccccgtgatcgtcacctccaacaccaacatgtgcgccgtgattgacgggaacagcaccaccttcgagcaccagcagccgttgcaggaccggatgttcaaatttgaactcacccgccgtctggagcatgactttggcaaggtgacaaagcaggaagtcaaagagttcttccgctgggcgcaggatcacgtgaccgaggtggcgcatgagttctacgtcagaaagggtggagccaacaagagacccgcccccgatgacgcggataaaagcgagcccaagcgggcctgcccctcagtcgcggatccatcgacgtcagacgcggaaggagctccggtggactttgccgacaggtaccaaaacaaatgttctcgtcacgcgggcatgcttcagatgctgtttccctgcaagacatgcgagagaatgaatcagaatttcaacatttgcttcacgcgcgggaccagagactgttcagaatgtttcccgggcgtgtcagaatctcaaccggtcgtcagaaagaggacgtatcggaaactctgtgccattcatcatctgctggggcgggctcccgagattgcttgctcggcctgcgatctggtcaacgtggacctggatgactgtgtttctgagcaataaatgacttaaaccaggtatggctgccgatggttatcttccagattggctcgaggacaacctctctgagggcattcgcgagtggtgggacttgaaacctggagccccgaaacccaaagccaaccagcaaaagcaggacgacggccggggtctggtgcttcctggctacaagtacctcggacccttcaacggactcgacaagggggagcccgtcaacgcggcggacgcagcggccctcgagcacgacaaggcctacgaccagcagctcaaagcgggtgacaatccgtacctgcggtataaccacgccgacgccgagtttcaggagcgtctgcaagaagatacgtcttttgggggcaacctcgggcgagcagtcttccaggccaagaagcgggttctcgaacctctcggtctggttgaggaaggcgctaagacggctcctggaaagaagagaccggtagagccatcaccccagcgttctccagactcctctacgggcatcggcaagacaggccagcagcccgcgaaaaagagactcaactttgggcagactggcgactcagagtcagtgcccgaccctcaaccaatcggagaaccccccgcaggcccctctggtctgggatctggtacaatggctgcaggcggtggcgctccaatggcagacaataacgaaggcgccgacggagtgggtagttcctcaggaaattggcattgcgattccacatggctgggcgacagagtcatcaccaccagcacccgaacctgggccctccccacctacaacaaccacctctacaagcaaatctccaacgggacatcgggaggaagcaccaacgacaacacctacttcggctacagcaccccctgggggtattttgactttaacagattccactgccacttctcaccacgtgactggcagcgactcatcaacaacaactggggattccggcccaagagactcaacttcaagctcttcaacatccaggtcaaggaggtcacgcagaatgaaggcaccaagaccatcgccaataaccttaccagcacgattcaggtctttacggactcggaataccagctcccgtacgtcctcggctctgcgcaccagggctgcccgcctccgttcccggcggacgtcttcatgattcctcagtacgggtacctgactctgaacaacggcagtcaggccgtgggccgttcctccttctactgcctggagtactttccttctcaaatgcggagaacgggcaacaactttgagttcagctaccagtttgaggacgtgccttttcacagcagctacgcgcatagccaaagcctggaccggctgatgaaccccctcatcgaccagtacctgtactacctgtctcggactcagtccacgggaggtaccgcaggaactcagcagttgctattttctcaggccgggcctaataacatgtcggctcaggccaaaaactggctacccgggccctgctaccggcagcaacgcgtctccacgacactgtcgcaaaataacaacagcaactttgcttggaccggtgccaccaagtatcatctgaatggcagagactctctggtaaatcccggtgtcgctatggcaacgcacaaggacgacgaagagcgattttttccatccagcggagtcttgatgtttgggaaacagggagctggaaaagacaacgtggactatagcagcgttatgctaaccagtgaggaagaaatcaaaaccaccaacccagtggccacagaacagtacggcgtggtggccgataacctgcaacagcaaaacgccgctcctattgtaggggccgtcaacagtcaaggagccttacctggcatggtctggcagaaccgggacgtgtacctgcagggtcctatctgggccaagattcctcacacggacggcaactttcatccttcgccgctgatgggaggctttggactgaaacacccgcctcctcagatcctgattaagaatacacctgttcccgcggatcctccaactaccttcagtcaagccaagctggcgtcgttcatcacgcagtacagcaccggacaggtcagcgtggaaattgaatgggagctgcagaaagagaacagcaagcgctggaacccagagattcagtatacttccaactactacaaatctacaaatgtggactttgctgtcaatactgagggtacttattcagagcctcgccccattggcacccgttacctcacccgtaacctgtaattgcctgttaatcaataaaccggttaattcgtttcagttgaactttggtctctgcgaagggcgaattc

SEQ ID NO: 430 - protein, 738 aa, Artificial Sequence; identical to SEQ ID NO: 418
  source: /note="Description of Artificial Sequence: Synthetic polypeptide"

SEQ ID NO: 431 - DNA, 1933 bp, Artificial Sequence
  source: /note="Description of Artificial Sequence: Synthetic polynucleotide"
  modified_base (1302)..(1302): a, c, t, or g
caaggcctacgaccagcagctcaaagcgggtgacaatccgtacctgcggtataaccacgccgacgccgagtttcaggagcgtcttcaagaagatacgtcttttgggggcaacctcgggcgagcagtcttccaggccaaaaagcgggttctcgaacctcttggtctggttgagacgccagctaagacggcacctggaaagaagcgaccggtagactcgccagactccacctcgggcatcggcaagaaaggccagcagcccgcgaaaaagagactcaactttgggcagactggcgactcagagtcagtccccgaccctcaaccaatcggagaaccaccagcaggcccctctggtctgggatctggtacaatggctgcaggcggtggcgcaccaatggctgacaataacgagggcgccgacggagtgggtaatgcctcaggaaattggcattgcgattccacatggctgggcgacagagtcatcaccaccagcacccgaacctgggccctgcccacctacaacaaccacctctacaagcaaatctccagtcagtcagcagggagcaccaacgataacgtctatttcggctacagcaccccctgggggtattttgacttcaacagattccattgccacttctcaccacgtgactggcagcgacttatcaacaacaactggggattccggcccaagaagctcaacttcaagctcttcaacatccaggtcaaggaggtcacgacgaatgacggtgtcacaaccatcgctaataaccttaccagcacggttcaggtcttttcggactcggaatatcaactgccgtacgtcctcggctccgcgcaccagggctgcctgcctccgttcccggcagacgtgttcatgattccgcagtacggatacctgactctgaacaatggcagccaatcggtaggccgttcctccttctactgcctggagtactttccttctcagatgctgagaacgggcaacaacttcacctttagctacaccttcgaggacgtgcctttccacagcagctacgcgcacagccagagtctggaccggctgatgaatcccctcatcgaccagtacctgtactacttggccagaacacagagcaacgcaggaggtactgctggcaatcgggaactgcagttttatcagggcggacctaccaccatggccgaacaagcaaagaactggctgcccggaccttgcttccggcaacagagagtatccaagacgctggatcaaaataacaacagcaactttgcctggactggtgccacaaaataccatttaaatgnaagaaattcattggttaatcccggtgtcgccatggcaacccacaaggacgacgaggaacgcttcttcccttcgagcggagttctaatttttggcaaaactggagcagctaataaaactacattagaaaacgtgctcatgacaaatgaagaagaaattcgtcctaccaacccggtagctaccgaggaatacgggattgtaagcagcaacttgcaggcggctagcaccgcagcccagacacaagttgttaacaaccagggagccttacctggcatggtctggcagaaccgggacgtgtacctgcaaggtcccatttgggccaagattcctcacacggacggcaactttcacccgtctcctctaatgggtggctttggactgaaacacccgcctccccagatcctgatcaaaaacacaccggtacctgctaatcctccagaagtgtttactcctgccaagtttgcttccttcatcacgcagtacagcaccgggcaagtcagcgttgagatcgagtgggagctgcagaaagagaacagcaagcgctggaacccagagattcagtacacctccaactttgacaaacagactggagtggactttgctgttgacagccagggtgtttactctgagcct

SEQ ID NO: 432 - protein, 733 aa, Artificial Sequence
  source: /note="Description of Artificial Sequence: Synthetic polypeptide"
MAADGYLPDWLEDNLSEGIREWWDLKPGAPKPKANQQKQDDGRGLVLPGYKYLGPFNGLDKGEPVNAADAAALEHDKAYDQQLKAGDNPYLRYNHADAEFQERLQEDTSFGGNLGRAVFQAKKRVLEPLGLVEEGAKTAPGKKRPLESPQEPDSSSGIGKKGKQPAKKRLNFEEDTGAGDGPPEGSDTSAMSSDIEMRAAPGGNAVDAGQGSDGVGNASGDWHCDSTWSEGKVTTTSTRTWVLPTYNNHLYLRLGTTSNSNTYNGFSTPWGYFDFNRFHCHFSPRDWQRLINNNWGLRPKAMRVKIFNIQVKEVTTSNGETTVANNLTSTVQIFADSSYELPYVMDAGQEGSLSPFPNDVFMVPQYGYCGIVTGENQNQTDRNAFYCLEYFPSQMLRTGNNFEMAYNFGKVPFHSMYAYSQSPDRLMNPLLDQYLWHLQSTTSGETLNQGNAATTFGKIRSGDFAFYRKNWLPGPCVKQQRLSKTASQNYKIPASGGNALLKYDTHYTLNNRWSNIAPGPPMATAGPSDGDFSNAQLIFPGPSVTGNTTTSANNLLFTSEEEIAATNPRDTDMFGQIADNNQNATTAPITGNVTAMGVLPGMVWQNRDIYYQGPIWAKIPHADGHFHPSPLIGGFGLKHPPPQIFIKNTPVPANPATTFTAARVDSFITQYSTGQVAVQIEWEIEKERSKRWNPEVQFTSNYGNQSSMLWAPDTTGKYTEPRVIGSRYLTNHL

SEQ ID NO: 433 - DNA, 3105 bp, Artificial Sequence
  source: /note="Description of Artificial Sequence: Synthetic polynucleotide"
gaattcgcccttgctgcgtcaactggaccaatgagaactttcccttcaacgattgcgtcgacaagatggtgatctggtgggaggagggcaagatgaccgccaaggtcgtggagtccgccaaggccattctgggcggaagcaaggtgcgcgtggaccaaaagtgcaagtcatcggcccagatcgaccccacgcccgtgatcgtcacctccaacaccaacatgtgcgccgtgatcgacgggaacagcaccaccttcgagcaccagcagccgctgcaggaccgcatgttcaagttcgagctcacccgccgtctggagcacgactttggcaaggtgaccaagcaggaagtcaaagagttcttccgctgggctcaggatcacgtgactgaggtggcgcatgagttctacgtcagaaagggcggagccaccaaaagacccgcccccagtgacgcggatataagcgagcccaagcgggcctgcccctcagttgcggagccatcgacgtcagacgcggaagcaccggtggactttgcggacaggtaccaaaacaaatgttctcgtcacgcgggcatgcttcagatgctgtttccctgcaagacatgcgagagaatgaatcagaatttcaacgtctgcttcacgcacggggtcagagactgctcagagtgcttccccggcgcgtcagaatctcaacccgtcgtcagaaaaaagacgtatcagaaactgtgcgcgattcatcatctgctggggcgggcacccgagattgcgtgttcggcccgcgatctcgtcaacgtggacttggatgactgtgtttctgagcaataaatgacttaaaccaggtatggctgctgacggttatcttccagattggctcgaggacaacctctctgagggcattcgcgagtggtgggacctgaaacctggagcccccaagcccaaggccaaccagcagaagcaggacgacggccggggtctggtgcttcctggctacaagtacctcggacccttcaacggactcgacaagggggagcccgtcaacgcggcggacgcagcggccctcgagcacgacaaggcctacgaccagcagctcaaagcgggtgacaatccgtacctgcggtataaccacgccgacgccgagtttcaggagcgtctgcaagaagatacgtcttttgggggcaacctcgggcgagcagtcttccaggccaagaagagggtactcgaacctctgggcctggttgaagaaggtgctaagacggctcctggaaagaagagaccgttagagtcaccacaagagcccgactcctcctcaggaatcggcaaaaaaggcaaacaaccagccaaaaagagactcaactttgaagaggacactggagccggagacggaccccctgaaggatcagataccagcgccatgtcttcagacattgaaatgcgtgcagcaccgggcggaaatgctgtcgatgcgggacaaggttccgatggagtgggtaatgcctcgggtgattggcattgcgattccacctggtctgagggcaaggtcacaacaacctcgaccagaacctgggtcttgcccacctacaacaaccacttgtacctgcggctcggaacaacatcaaacagcaacacctacaacggattctccaccccctggggatactttgactttaacagattccactgtcacttctcaccacgtgactggcaaagactcatcaacaacaactggggactacgaccaaaagccatgcgcgttaaaatcttcaatatccaagttaaggaggtcacaacgtcgaacggcgagactacggtcgctaataaccttaccagcacggttcagatatttgcggactcgtcgtatgagctcccgtacgtgatggacgctggacaagagggaagtctgtctcctttccccaatgacgtcttcatggtgcctcaatatggctactgtggcattgtgactggcgaaaatcagaaccagacggacagaaatgctttctactgcctggagtattttccttcacaaatgctgagaactggcaataactttgaaatggcttacaactttgggaaggtgccgttccactcaatgtatgcttacagccagagcccggacagactgatgaatcccctcctggaccagtacctgtggcacttacagtcgaccacctctggagagactctgaatcaaggcaatgcagcaaccacatttggaaaaatcaggagtggagactttgccttttacagaaagaactggctgcctgggccttgtgttaaacagcagagactctcaaaaactgccagtcaaaattacaagattcctgccagcgggggcaacgctctgttaaagtatgacacccactataccttaaacaaccgctggagcaacatagcgcctggacctccaatggcaacagctggaccttcagatggggacttcagcaacgcccagctcatcttccctggaccatcagtcaccggaaacacaacaacctcagcaaacaatctgttgtttacatcagaagaagaaattgctgccaccaacccaagagacacggacatgtttggtcagattgctgacaataatcagaatgctacaactgctcccataaccggcaacgtgactgctatgggagtgcttcctggcatggtgtggcaaaacagagacatttactaccaagggccaatttgggccaagatcccacacgcggacggacattttcatccttcaccgctaattggcggttttggactgaaacatccgcctccccagatatttatcaaaaacacccccgtacctgccaatcctgcgacaaccttcactgcagccagagtggactctttcatcacacaatacagcaccggccaggtcgctgttcagattgaatgggaaatcgaaaaggaacgctccaaacgctggaatcctgaagtgcagtttacttcaaactatgggaaccagtcttctatgttgtgggctcccgatacaactgggaagtatacagagccgcgggttattggctctcgttatttgactaatcatttgtaactgcctagttaatcaataaaccgtgtgattcgtttcagttgaactttggtctctgcgaagggcgaattc

SEQ ID NO: 434 - protein, 733 aa, Artificial Sequence
  source: /note="Description of Artificial Sequence: Synthetic polypeptide"
MAADGYLPDWLEDNLSEGIREWWDLKPGAPKPKANQQKQDDGRGLVLPGYKYLGPFNGLDKGEPVNAADAAALEHDKAYDQQLKAGDNPYLRYNHADAEFQERLQEDTSFGGNLGRAVFQAKKRVLEPLGLVEEGAKTAPGKKRPLESPQEPDSSSGIGKKGKQPAKKRLNFEEDTGAGDGPPEGSDTSAMSSDIEMRAAPGGNAVDAGQGSDGVGNASGDWHCDSTWSEGKVTTTSTRTWVLPTYNNHLYLRLGTTSNSNTYNGFSTPWGYFDFNRFHCHFSPRDWQRLINNNWGLRPKAMRVKIFNIQVKEVTTSNGETTVANNLTSTVQIFADSSYELPYVMDAGQEGSLPPFPNDVFMVPQYGYCGIVTGENQNQTDRNAFYCLEYFPSQMLRTGNNFEMAYNFEKVPFHSMYAHSQSLDRLMNPLLDQYLWHLQSTTSGETLNQGNAATTFGKIRSGDFAFYRKNWLPGPCVKQQRFSKTASQNYKIPASGGNALLKYDTHYTLNNRWSNIAPGPPMATAGPSDGDFSNAQLIFPGPSVTGNTTTSANNLLFTSEEEIAATNPRDTDMFGQIADNNQNATTAPITGNVTAMGVLPGMVWQNRDIYYQGPIWAKIPHADGHFHPSPLIGGFGLKHPPPQIFIKNTPVPANPATTFTAARVDSFITQYSTGQVAVQIEWEIEKERSKRWNPEVQFTSNYGNQSSMLWAPDTTGKYTEPRVIGSRYLTNHL

SEQ ID NO: 435 - DNA, 3105 bp, Artificial Sequence
  source: /note="Description of Artificial Sequence: Synthetic polynucleotide"
gaattcgcccttgctgcgtcaactggaccaatgagaactttcccttcaacgattgcgtcgacaagatggtgatctggtgggaggagggcaagatgaccgccaaggtcgtggagtccgccaaggccattctgggcggaagcaaggtgcgcgtggaccaaaagtgcaagtcatcggcccagatcgaccccacgcccgtgatcgtcacctccaacaccaacatgtgcgccgtgatcgacgggaacagcaccaccttcgagcaccagcagccgctgcaggaccgcatgttcaagttcgagctcacccgccgtctggagcacgactttggcaaggtgaccaagcaggaagtcaaagagttcttccgctgggctcaggatcacgtgactgaggtggcgcatgagttctacgtcagaaagggcggagccaccaaaagacccgcccccagtgacgcggatataagcgagcccaagcgggcctgcccctcagttgcggagccatcgacgtcagacgcggaagcaccggtggactttgcggacaggtaccaaaacaaatgttctcgtcacgcgggcatgcttcagatgctgtttccctgcaagacatgcgagagaatgaatcagaatttcaacgtctgcttcacgcacggggtcagagactgctcagagtgcttccccggcgcgtcagaatctcaacccgtcgtcagaaaaaagacgtatcagaaactgtgcgcgattcatcatctgctggggcgggcacccgagattgcgtgttcggcctgcgatctcgtcaacgtggacttggatgactgtgtttctgagcaataaatgacttaaaccaggtatggctgctgacggttatcttccagattggctcgaggacaacctctctgagggcattcgcgagtggtgggacctgaaacctggagcccccaagctcaaggccaaccagcagaagcaggacgacggccggggtctggtgcttcctggctacaagtacctcggacccttccacggactcgacaagggggagcccgtcaacgcggcggacgcagcggccctcgagcacgacaaggcctacgaccagcagctcaaagcgggtgacaatccgtacctgcggtataaccacgccgacgccgagtttcaggagcgtctgcaagaagatacgtcttttgggggcaacctcgggcgagcagtcttccaggccaagaagagggtactcgaaccactgggcctggttgaagaaggtgctaagacggctcctggaaagaagagaccgttagagtcaccacaagagcccgactcctcctcaggaatcggcaaaaaaggcaaacaaccagccaaaaagagactcaactttgaagaggacactggagccggagacggaccccctgaaggatcagataccagcgccatgtcttcagacattgaaatgcgtgcagcaccgggcggaaatgctgtcgatgcgggacaaggttccgatggagtgggtaatgcctcgggtgattggcattgcgattccacctggtctgagggcaaggtcacaacaacctcgaccagaacctgggtcttgcccacctacaacaaccacttgtacctgcggctcggaacaacatcaaacagcaacacctacaacggattctccaccccctggggatactttgactttaacagattccactgtcacttctcaccacgtgactggcaaagactcatcaacaacaactggggactacgaccaaaagccatgcgcgttaaaatcttcaatatccaagttaaggaggtcacaacgtcgaacggcgagactacggtcgctaataaccttaccagcacggttcagatatttgcggactcgtcgtatgagctcccgtacgtgatggacgctggacaagagggaagtctgcctcctttccccaatgacgtcttcatggtgcctcaatatggctactgtggcattgtgactggcgaaaatcagaaccagacggacagaaatgctttctactgcctggagtattttccttcacaaatgctgagaactggcaataactttgaaatggcttacaactttgagaaggtgccgttccactcaatgtatgctcacagccagagcctggacagactgatgaatcccctcctggaccagtacctgtggcacttacagtcgaccacctctggagagactctgaatcaaggcaatgcagcaaccacatttggaaaaatcaggagtggagactttgccttttacagaaagaactggctgcctgggccttgtgttaaacagcagagattctcaaaaactgccagtcaaaattacaagattcctgccagcgggggcaacgctctgttaaagtatgacacccactataccttaaacaaccgctggagcaacatagcgcctggacctccaatggcaacagctggaccttcagatggggacttcagcaacgcccagctcatcttccctggaccatcagtcaccggaaacacaacaacctcagcaaacaatctgttgtttacatcagaaggagaaattgctgccaccaacccaagagacacggacatgtttggtcagattgctgacaataatcagaatgctacaactgctcccataaccggcaacgtgactgctatgggagtgcttcctggcatggtgtggcaaaacagagacatttactaccaagggccaatttgggccaagatcccacacgcggacggacattttcatccttcaccgctaattggcggttttggactgaaacatccgcctccccagatatttatcaaaaacacccccgtacctgccaatcctgcgacaaccttcactgcagccagagtggactctttcatcacacaatacagcaccggccaggtcgctgttcagattgaatgggaaatcgaaaaggaacgctccaaacgccggaatcctgaagtgcagtttacttcaaactatgggaaccagtcttctatgttgtgggctcccgatacaactgggaagtatacagagccgcgggttattggctctcgttatttgactaatcatttgtaactgcctagttaatcaataaaccgtgtgattcgtttcagttgaactttggtctctgcgaagggcgaattc

SEQ ID NO: 436 - protein, 733 aa, Artificial Sequence
  source: /note="Description of Artificial Sequence: Synthetic polypeptide"
MAADGYLPDWLEDNLSEGIREWWDLKPGAPKPKANQQKQDDGRGLVLPGYEYLGPFNGLDKGEPVNAADAAALEHDKAYDQQLKAGDNPYLRYNHADAEFQERLQEDTSFGGNLGRAVFQAKKRVLEPLGLVEEGAKTAPGKKRPLESPQEPDSSSGIGKKGKQPAKKRLNFEEDTGAGDGPPEGSDTSAMSSDIEMRAAPGGNAVDAGQGSDGVGNASGDWHCDSTWSEGKVTTTSTRTWVLPTYNNHLYLRLGTTSNSNTYNGFSTPWGYFDFNRFHCHFSPRDWQRLINNNWGLRPKAMRVKIFNIQVKEVTTSNGETTVANNLTSTVQIFADSSYELPYVMDAGQEGSLPPFPNDVFMVPQYGYCGIVTGENQNQTDRNAFYCLEYFPSQMLRTGNNFETAYNFEKVPFHSMYAHSQSLDGLMNPLLDQYLWHLQSTTSGETLNQGNAATTFGKIRSGDFAFYRKNWLPGPCVKQQRFSKTASQNYKIPASGGNALLKYDTHYTLNNRWSNIAPGPPMATAGPSDGDFSNAQLIFPGPSVTGNTTTSANNLLFTSEEEIAATNPRDTDMFGQIADNNQNATTAPITGNVTAMGVLPGMVWQNRDIYYQGPIWAKIPHADGHFHPSPLIGGFGLKHPPPQIFIKNTPVPAYPATTFTAARVDSFITQYSTGQVAVQIEWEIEKERSKRWNPEVQFTSNCGNQSSMLWAPDTTGKYTEPRVIGSRYLTNHL

SEQ ID NO: 437 - DNA, 3105 bp, Artificial Sequence
  source: /note="Description of Artificial Sequence: Synthetic polynucleotide"
gaattcgcccttcgcagagaccaaagttcaactgaaacgaatcacacggtttattgattaactaggcagttacaaatgattagtcaaataacgagagccaataacccgcggctctgtatacttcccagttgtatcgggagcccacaacatagaagactggttcccacagtttgaagtaaactgcacttcaggattccagcgtttggagcgttccttttcgatttcccattcaatctgaacagcgacctggccggtgctgtattgtgtgatgaaagagtccactctggctgcagtgaaggttgtcgcaggataggcaggtacgggggtgtttttgataaatatctggggaggcggatgtttcagtccaaaaccgccaattagcggtgaaggatgaaaatgtccgtccgcgtgtgggatcttggcccaaattggcccttggtagtaaatgtctctgttttgccacaccatgccaggaagcactcccatagcagtcacgttgccggttatgggagcagttgtagcattctgattattgtcagcaatctgaccaaacatgtccgtgtctcttgggttggtggcagcaatttcttcttctgatgtaaacaacagattgtttgctgaggttgttgtgtttccggtgactgatggtccagggaagatgagctgggcgttgctgaagtccccatctgaaggtccagctgttgccattggaggtccaggcgctatgttgctccagcggttgtttaaggtatagtgggtgtcatactttaacagagcgttgcccccgctggcaggaatcttgtaattttgactggcagtttttgagaatctctgctgtttaacacaaggcccaggcagccagttctttctgtaaaaggcaaagtctccactcctgatttttccaaatgtggttgctgcattgccttgattcagagtctctccagaggtggtcgactgtaagtgccacaggtactggtccaggaggggattcatcagtccgtccaggctctggctgtgagcatacattgagtggaacggcaccttctcaaagttgtaagccgtttcaaagttattgccagttctcagcatttgtgaaggaaaatactccaggcagtagaaagcatttctgtccgtctggttctgattttcgccagtcacaatgccacagtagccatattgaggcaccatgaagacgtcattggggaaaggaggcagacttccctcttgtccagcgtccatcacgtacgggagctcatacgacgagtccgcaaatatctgaaccgtgctggtaaggttattagcgaccgtagtctcgccgttcgacgttgtgacctccttaacttggatattgaagattttaacgcgcatggcttttggtcgtagtccccagttgttgttgatgagtctttgccagtcacgtggtgagaagtgacagtggaatctgttaaagtcaaagtatccccagggggtggagaatccgttgtaggtgttgctgtttgatgttgttccgagccgcaggtacaagtggttgttgtaggtgggcaagacccaggttctggtcgaggttgttgtgaccttgccctcagaccaggtggaatcgcaatgccaatcacccgaggcattacccactccatcggaaccttgtcccgcatcgacagcatttccgcccggtgctgcacgcatttcaatgtctgaagacatggcgctggtatctgatccttcagggggtccgtctccggctccagtgtcctcttcaaagttgagtctctttttggctggttgtttgccttttttgccgattcctgaggaggagtcgggctcttgtggtgactctaacggtctcttctttccaggagccgtcttagcaccttcttcaaccaggcccagaggttcgagtaccctcttcttggcctggaagactgctcgcccgaggttgcccccaaaagacgtatcttcttgcagacgctcctgaaactcggcgtcggcgtggttataccgcaggtacggattgtcacccgctttgagctgctggtcgtaggccttgtcgtgctcgagggccgctgcgtccgccgcgttgacgggctcccccttgtcgagtccgttgaagggtccgaggtactcgtagccaggaagcaccagaccccggccgtcgtcctgcttctgctggttggccttgggcttgggggctccaggtttcaggtcccaccactcgcgaatgccctcagagaggttgtcctcgagccaatctggaagataaccgtcagcagccatacctggtttaagtcatttattgctcagaaacacagtcatccaagtccacgttgacgagatcgcaggccgaacacgcaatctcgggtgcccgccccagcagatgatgaatcgcgcacagtttctgatacgtcttttttctgacgacgggttgagattctgacgcgccggggaagcactctgagcagtctctgaccccgtgcgtgaagcagacgttgaaattctgattcattctctcgcatgtcttgcagggaaacagcatctgaagcatgcccgcgtgacgagaacatttgttttggtacctgtccgcaaggtccaccggtgcttccgcgtctgacgtcgatggctccgcaactgaggggcaggcccgcttgggctcgcttatatccgcgtcactgggggcgggtcttttggtggctccgccctttctgacgtagaactcatgcgccacctcagtcacgtgatcctgagcccagcggaagaactctttgacttcctgcttggtcaccttgccaaagtcgtgctccagacggcgggtgagctcgaacttgaacatgcggtcctgcagcggctgctggtgctcgaaggtggtgctgttcccgtcgatcacggcgcacatgttggtgttggaggtgacgatcacgggcgtggggtcgatctgggccgatgacttgcacttttggtccacgcgcaccttgcttccgcccagaatggccttggcggactccacgaccttggcggtcatcttgccctcctcccaccagatcaccatcttgtcgacgcaatcgttgaagggaaagttctcattggtccagttgacgcagcaagggcgaattc

SEQ ID NO: 438 - protein, 729 aa, Artificial Sequence
  source: /note="Description of Artificial Sequence: Synthetic polypeptide"
MAADGYLPDWLEDNLSEGIREWWDLKPGAPKPKANQQKQDDGRGLVLPGYKYLGPFNGLDKGEPVNAADAAALEHDKAYDQQLKAGDNPYLRYNHADAEFQERLQEDTSFGGNLGRAVFQAKKRVLEPLGLVEEGAKTAPGKKRPIDSPDSSTGIGKKGQQPAKKKLNFGQTGDSESVPDPQPLGEPPAAPSSVGSGTMAAGGGAPMADNNEGADGVGNASGNWHCDSTWLGDRVITTSTRTWALPTYNNHLYKQISSSSSGATNDNHYFGYSTPWGYFDFNRFHCHFSPRDWQRLINNNWGFRPKKLRFKLFNIQVKEVTTNDGVTTIANNLTSTVQVFSDSEYQLPYVLGSAHQGCLPPFPADVFMIPQYGYLTLNNGSQSVGRSSFYCLEYFPSQMLRTGNNFEFSYSFEDVPFHSSYAHSQSLDRLMNPLIDQYLYYLARTQSTTGSTRELQFHQAGPNTMAEQSKNWLPGPCYRQQGLSKNLDFNNNSNFAWTAATKYHLNGRNSLTNPGIPMATNKDDEDQFFPINGVLVFGKTGAANKTTLENVLMTSEEEIKTTNPVATEEYGVVSSNLQPSTAGPQSQTINSQGALPGMVWQNRDVYLQGPIWAKIPHTDGNFHPSPLMGGFGLKHPPPQILIKNTPVPANPPEVFTPAKFASFITQYSTGQVSVEIEWELQKENSKRWNPEIQYTSNYAKSNNVEFAVNPDGVYTEPRPIGTRYLPRNL

SEQ ID NO: 439 - DNA, 3094 bp, Artificial Sequence
  source: /note="Description of Artificial Sequence: Synthetic polynucleotide"
gaattcgcccttgctgcgtcaactggaccaagagaactttcccttcaacgattgcgtcgacaagatggtgatctggtgggaggagggcaagatgacggccaaggtcgtggagtccgccaaagccattctgggcggaagcaaggtgcgcgtcgaccaaaagtgcaagtcctcggcccagatcgatcccacccccgtgatcgtcacctccaacaccaacatgtgcgccgtgatcgacgggaacagcaccaccttcgagcaccagcagccgttgcaggaccggatgttcaaatttgaactcacccgccgtctggaacacgactttggcaaggtgaccaagcaggaagtcaaagagttcttccgctgggctagtgatcacgtgactgaggtgacgcatgagttctacgtcagaaagggcggagccagcaaaagacccgcccccgatgacgcggatataagcgagcccaagcgggcctgtccctcagtcacggacccatcgacgtcagacgcggaaggagctccggtggactttgccgacaggtaccaaaacaaatgttctcgtcacgcgggcatgcttcagatgctgtttccctgcaaaacgtgcgagagaatgaatcagaatttcaacatttgcttcacgcacggggtcagagactgtttagaatgtttccccggcgtgtcagaatctcaaccggtcgtcagaaaaaagacgtatcggaagctgtgtgcgattcatcatctgctggggcgggcacccgagattgcttgctcggcctgcgacctggtcaacgtggacctggacgactgtgtttctgagcaataaatgacttaaaccgggtatggctgccgatggttatcttccagattggctcgaggacaacctctctgagggcattcgcgagtggtgggacctgaaacctggagccccgaaacccaaagccaaccagcaaaagcaggacgacggccggggtctggtgcttcctggctacaagtacctcggacccttcaacggactcgacaagggggagcccgtcaacgcggcggacgcagcggccctcgagcacgacaaggcctacgaccagcagctcaaagcgggtgacaatccgtacctgcggtataaccacgccgacgccgagtttcaggagcgtctgcaagaagatacgtcatttgggggcaacctcgggcgagcagtcttccaggccaagaagcgggttctcgaacctctcggtctggttgaggaaggcgctaagacggctcctggaaagaagagacccatagactctccagactcctccacgggcatcggcaaaaaaggccagcagcccgctaaaaagaagctcaattttggtcagactggcgactcagagtcagtccccgaccctcaacctcttggagaacctccagcagcgccctctagtgtgggatctggtacaatggctgcaggcggtggcgcaccaatggcagacaataacgaaggtgccgacggagtgggtaatgcctcaggaaattggcattgcgattccacatggctgggcgacagagtcatcaccaccagcaccagaacctgggccctccccacctacaacaaccacctctacaagcaaatctccagcagcagctcaggagccaccaatgacaaccactacttcggctacagcaccccctgggggtattttgactttaacagattccactgccacttctcaccacgtgactggcagcgactcatcaacaacaactggggattccggcccaagaagctgcggttcaagctcttcaacatccaggtcaaggaggtcacaacgaatgacggcgtcacgaccatcgctaataaccttaccagcacggttcaggtcttctcggactcggaataccagctgccgtacgtcctcggctctgcgcaccagggctgcctgcctccgttcccggcggacgtcttcatgattcctcagtacggctacctgactctgaacaacggcagccaatcggtgggccgttcctccttctactgcctggaatatttcccctctcaaatgctgagaacgggcaacaactttgagttcagttacagcttcgaggacgtgcctttccacagcagctacgcgcacagccagagcctagaccggctgatgaaccctctcatcgaccagtacctgtactacctggcccggacccagagcaccacgggttccaccagggaactgcaatttcatcaagctgggcccaatactatggccgagcagtcaaagaactggctgcctggaccctgctataggcaacagggactgtcaaagaacttggactttaacaacaacagcaattttgcctggactgctgccactaaatatcatctgaatggcagaaactctttgaccaatcctggcattcccatggcaaccaacaaggatgatgaggaccagttctttcccatcaacggggtactggtttttggcaagacgggagctgccaacaaaactacgctggaaaacgttctgatgaccagcgaggaggagatcaagaccactaaccctgtggctacagaagaatacggtgtggtctccagcaacctgcagccgtctacagccgggcctcaatcacagactatcaacagccagggagcactgcctggcatggtctggcagaaccgggacgtgtatctgcagggtcccatctgggccaaaattcctcacacggatggcaactttcacccgtctcctctgatgggcggttttggactcaaacacccgcctccacagatcctgatcaaaaacacacctgtacctgctaatcctccggaggtgtttactcctgccaagtttgcctccttcatcacgcagtacagcaccggacaagtcagcgtggaaatcgagtgggagctgcagaaagaaaacagcaagcgctggaacccagaaattcagtatacttccaattatgccaagtctaataatgttgaatttgctgtgaaccctgatggtgtttatactgagcctcgccccattggcactcgttacctcccccgtaatctgtaattgcttgttaatcaataaaccggttgattcgtttcagttgaactttggtctctgcgaagggcgaattc

SEQ ID NO: 440 - protein, 1458 aa, Artificial Sequence
  source: /note="Description of Artificial Sequence: Synthetic polypeptide"
MAADGYLPDWLEDNLSEGIREWWDLKPGAPKPKANQQKQDDGRGLVLPGYKYLGPFNGLDKGEPVNAADAAALEHDKAYDQQLKAGDNPYLRYNHADAEFQERLQEDTSFGGNLGRAVFQAKKRVLEPLGLVEEGAKTAPGKKRPIDSPDSSTGIGKKGQQPAKKKLNFGQTGDSESVPDPQPLGEPPAAPSSVGSGTMAAGGGAPTADNNEGADGVGNASGNWHCDSTWLGDRVITTSTRTWALPTYNNHLYKQISSSSSGATNDNHYFGYSTPWGYFDFNRFHCHFSPRDWQRLINNNWGFRPKKLRFKLFNIQVKEVTTNDGVTTIANNLTSTVQVFSDSEYQLPYVLGSAHQGCLPPFPADVFMIPQYGYLTLNNGSQSVGRSSFYCLEYFPSQMLRTGNNFEFSYSFEDVPFHSSYAHSQSLDRLMNPLIDQYLYYLARTQSTTGSTRELQFHQAGPNTMAEQSKNWLPGPCYRQQRLSKNLDFNNNSNFAWTAATKYHLNGRNSLTNPGIPMATNKDDEDQFFPINGVLVFGKTGAANKTTLENVLMTSEEEIKTTNPVATEEYGVVSSNLQSSTAGPQSQTINSQGALPGMVWQNRDVYLQGPIWAKIPHTDGNFHPSPLMGGFGLEHPPPQILIKNTPVPANPPEVFTPAKFASFITQYSTGQVSVEIEWELQKENSKRWNPEIQYTSNYAKSNNVEFAVNPDGVYTEPRPIGTRYLTRNLMAADGYLPDWLEDNLSEGIREWWDLKPGAPKPKANQQKQDDGRGLVLPGYKYLGPFNGLDKGEPVNAADAAALEHDKAYDQQLKAGDNPYLRYNHADAEFQERLQEDTSFGGNLGRAVFQAKKRVLEPLGLVEEGAKTAPGKKRPIGSPDSSTGIGKKGQQPAKKKLNFGQTGDSESVPDPQPLGEPPAAPSSVGSGTMAAGGGAPMADNNEGADGVGNASGNWHCDSTWLGDRVITTSTRTWALPTYNNHLYKQISSSSSGATNDNHYFGYSTPWGYFDFNRFHCHFSPRDWQRLINNNWGFRPKKLRFKLLNIQVKEVTTNDGVTTIANNLTSTVQVFSDSEYQLPYVLGSAHQGCLPPFPADVFMIPQYGYLTLDNGSQSVGRSSFYCLEYFPSQMLRTGNNFEFSYSFEDVPFHSSYAHSQSLDRLMNPLIDQYLYYLARTQSTTGSTRELQFHQAGPNTMAEQSKNWLPGPCYRQQRLSKNLDFNNNSNFAWTAATKYHLNGRNSLTNPGIPMATNKDDEDQFFPINGVLVFGKTGAANKTTLENVLMTSEEEIKTTNPVATEEYGVVSSNLQSSTAGPQSQTINSQGALPGMVWQNRDVYLQGPIWAKIPHTDGNFHPSPLMGGFGLKHPPPQILIKNTPVPANPPEVFTPAKFASFITQYSTGQVSVEIEWELQKENSKRWNPEIQYTSNYAKSNNVEFAVNPDGVYTEPRPIGTRYLTRNL

SEQ ID NO: 441 - DNA, 3095 bp, Artificial Sequence
  source: /note="Description of Artificial Sequence: Synthetic polynucleotide"
gaattcgcccttcgcagagaccaaagttcaactgaaacgaatcaaccggtttattgattaacaagcaattacagattacgggtgaggtaacgagtgccaatggggcgaggctcagtataaacaccatcagggttcacagcaaattcaacattattagacttggcataattggaagtatactgaatttctgggttccagcgcttgctgttttctttctgcagctcccactcgatttccacgctgacttgtccggtgctgtactgcgtgatgaaggaggcaaacttggcaggagtaaacacctccggaggattagcaggtacaggtgtgtttttgatcaggatctgtggaggcgggtgtttgagtccaaaaccgcccatcagaggagacgggtgaaagttgccatccgtgtgaggaattttggcccagatgggaccctgcagatacacgtcccggttctgccagaccatgccaggcagtgctccctggctgttgatagtctgtgattgaggcccggctgtagacgactgcaggttgctggagaccacaccgtattcttctgtagccacagggttagtggtcttgatctcctcctcgctggtcatcagaacgttttccagcgtagttttgttggcagctcccgtcttgccaaaaaccagtaccccgttgatgggaaagaactggtcctcatcatccttgttggttgccatgggaatgccaggattggtcaaagagtttctgccattcagatgatatttagtggcagcagtccaggcaaaattgctgttgttgttaaagtccaagttctttgacagtctctgttgcctatagcagggtccaggcagccagttctttgactgctcggccatagtattgggcccagcttgatgaaattgcagttccctggtggaacccgtggtgctctgggtccgggccaggtagtacaggtactggtcgatgagagggttcatcagccggtctaggctctggctgtgcgcgtagctgctgtggaaaggcacgtcctcgaagctgtaactgaactcaaagttgttgcccgttctcagcatttgagaggggaaatattccaggcagtagaaggaggaacggcccaccgattggctgccgttgtccagagtcaggtagccgtactgaggaatcatgaagacgtccgccgggaacggaggcaggcagccctggtgcgcagagccgaggacgtacggcagctggtattccgagtccgagaagacctgaaccgtgctggtaaggttattagcgatggtcgtgacgccgtcattcgttgtgacctccttgacctggatgttgaggagcttgaaccgcagcttcttgggccggaatccccagttgttgttgatgagtcgctgccagtcacgtggtgagaagtggcagtggaatctgttaaagtcaaaatacccccagggggtgctgtagccgaagtagtggttgtcattggtggctcctgagctgctgctggagatttgcttgtagaggtggttgttgtaggtggggagggcccaggttctggtgctggtggtgatgactctgtcgcccagccatgtggaatcgcaatgccaatttcctgaggcattacccactccgtcggcaccttcgttattgtctgccattggtgcgccaccgcctgcagccattgtaccagatcccacactagagggcgctgctggaggttctccaagaggttgagggtcggggactgactctgagtcgccagtctgaccaaaattgagcttctttttagcgggctgctggccttttttgccgatgcccgtggaggagtctggagagcctatgggtctcttctttccaggagccgtcttagcgccttcctcaaccagaccgagaggttcgagaacccgcttcttggcctggaagactgctcgcccgaggttgcccccaaatgacgtatcttcttgcagacgctcctgaaactcggcgtcggcgtggttataccgcaggtacggattgtcacccgctttgagctgctggtcgtaggccttgtcgtgctcgagggccgctgcgtccgccgcgttgacgggctcccccttgtcgagtccgttgaagggtccgaggtacttgtagccaggaagcaccagaccccggccgtcgtcctgcttttgctggttggctttgggtttcggggctccaggtttcaggtcccaccactcgcgaatgccctcagagaggttgtcctcgagccaatctggaagataaccatcggcagccatacctggtttaagtcatttattgctcagaaacacagtcgtccaggtccacgttgaccaggtcgcaggccgagcaagcaatctcgggtgcccgccccagcagatgatgaatcgcacacagcttccgatacgtcttttttctgacgaccggttgagattctgacacgccggggaaacattctaaacagtctctgaccccgtgcgtgaagcaaatgttgaaattctgattcattctctcgcacgttttgcagggaaacagcacctgaagcatgcccgcgtgacgagaacatttgttttggtacctgtcggcaaagtccaccggagctccttccgcgtctgacgtcgatgggtccgtgactgagggacgggcccgcttgggctcgcttatatccgcgtcatcgggggcgggtcttttgctggctccgccctttctgacgtagaactcatgcgtcacctcagtcacgtgatcactagcccagcggaagaactctttgacttcctgctttgtcaccttgccaaagtcgtgttccagacggcgggtgagttcaaatttgaacatccggtcctgcaacggttgctggtgctcgaaggtggtgctgttcccgtcgatcacggcgcacatgttggtgttggaggtgacgatcacgggggtgggatcgatctgggcggacgacttgcacttttggtccacgcgcaccttgctgccgccgagaatggccttggcggactccacgaccttggccgtcatcttgccctcctcccaccagatcaccatcttgtcgacgcaatcgttgaagggaaagttctcattggtccagttgacgcagcaagggcgaattc

SEQ ID NO: 442 - DNA, 3095 bp, Artificial Sequence
  source: /note="Description of Artificial Sequence: Synthetic polynucleotide"
gaattcgcccttcgcagagaccaaagttcaactgaaacgaatcaaccggtttattgattaacaagcaattacagattacgggtgaggtaacgagtgccaatggggcgaggctcagtataaacaccatcagggttcacagcaaattcaacattattagacttggcataattggaagtatactgaatttctgggttccagcgcttgctgttttctttctgcagctcccactcgatttccacgctgacttgtccggtgctgtactgcgtgatgaaggaggcaaacttggcaggagtaaacacctccggaggattagcaggtacaggtgtgtttttgatcaggatctgtggaggcgggtgttcgagtccaaaaccgcccatcagaggagacgggtgaaagttgccatccgtgtgaggaattttggcccagatgggaccctgcagatacacgtcccggttctgccagaccatgccaggcagtgctccctggctgttgatagtctgtgattgaggcccggctgtagacgactgcaggttgctggagaccacaccgtattcttctgtagccacagggttagtggtcttgatctcctcctcgctggtcatcagaacgttttccagcgtagttttgttggcagctcccgtcttgccaaaaaccagtaccccgttgatgggaaagaactggtcctcatcatccttgttggttgccatgggaatgccaggattggtcaaagagtttctgccattcagatgatatttagtggcagcagtccaggcaaaattgctgttgttgttaaagtccaagttctttgacagtctctgttgcctatagcagggtccaggcagccagttctttgactgctcggccatagtattgggcccagcttgatgaaattgcagttccctggtggaacccgtggtgctctgggtccgggccaggtagtacaggtactggtcgatgagagggttcatcagccggtctaggctctggctgtgcgcgtagctgctgtggaaaggcacgtcctcgaagctgtaactgaactcaaagttgttgcccgttctcagcatttgagaggggaaatattccaggcagtagaaggaggaacggcccaccgattggctgccgttgttcagagtcaggtagccgtactgaggaatcatgaagacgtccgccgggaacggaggcaggcagccctggtgcgcagagccgaggacgtacggcagctggtattccgagtccgagaagacctgaaccgtgctggtaaggttattagcgatggtcgtgacgccgtcattcgttgtgacctccttgacctggatgttgaagagcttgaaccgcagcttcttgggccggaatccccagttgttgttgatgagtcgctgccagtcacgtggtgagaagtggcagtggaatctgttaaagtcaaaatacccccagggggtgctgtagccgaagtagtggttgtcattggtggctcctgagctgctgctggagatttgcttgtagaggtggttgttgtaggtggggagggcccaggttctggtgctggtggtgatgactctgtcgcccagccatgtggaatcgcaatgccaatttcctgaggcattacccactccgtcggcaccttcgttattgtctgccgttggtgcgccaccgcctgcagccattgtaccagatcccacactagagggcgctgctggaggttctccaagaggttgagggtcggggactgactctgagtcgccagtctgaccaaaattgagcttctttttagcgggctgctggccttttttgccgatgcccgtggaggagtctggagagtctatgggtctcttctttccaggagccgtcttagcgccttcctcaaccagaccgagaggttcgagaacccgcttcttggcctggaagactgctcgcccgaggttgcccccaaatgacgtatcttcttgcaggcgctcctgaaactcggcgtcggcgtggttataccgcaggtacggattgtcacccgctttgagctgctggtcgtaggccttgtcgtgctcgagggccgctgcgtccgccgcgttgacgggctcccccttgtcgagtccgttgaagggtccgaggtacttgtagccaggaagcaccagaccccggccgtcgtcctgcttttgctggttggctttgggtttcggggctccaggtttcaggtcccaccactcgcgaatgccctcagagaggttgtcctcgagccaatctggaagataaccatcggcagccatacctggtttaagccatttattgctcagaaacacagtcgtccaggtccacgttgaccaggtcgcaggccgagcaggcaatctcgggtgcccgccccagcagatgatgaatcgcacacagcttccgatacgtcttttttctgacgaccggttgagattctgacacgccggggaaacattctaaacagtctctgaccccgtgcgtgaagcaaatgttgaaattctgattcattctctcgcacgttttgcagggaaacagcatctgaagcatgcccgcgtggcgagaacatttgttttggtacctgtcggcaaagtccaccggagctccttccgcgtctgacgtcgatgggtccgtgactgagggacaggcccgcttgggctcgcttatatccgcgtcatcgggggcgggtcttttgctggctccgccctttctgacgtagaactcatgcgtcacctcagtcacgtgatcactagcccagcggaagaactctttgacttcctgctttgtcaccttgccaaagtcgtgttccagacggcgggtgagttcaaatttgaacatccggtcctgcaacggctgctggtgctcgaaggtggtgctgttcccgtcgatcacggcgcgcatgttggtgttggaggtgacgatcacgggggtgggatcgatctgggcggacgacttgcacttttggtccacgcgcaccttgctgccgccgagaatggccttggcggactccacgaccttggccgtcatcttgccctcctcccaccagatcaccatcttgtcgacgcaatcgttgaagggaaagttctcattggtccagttgacgcagcaagggcgaattc

SEQ ID NO: 443 - protein, 729 aa, Artificial Sequence; identical to SEQ ID NO: 171
  source: /note="Description of Artificial Sequence: Synthetic polypeptide"

SEQ ID NO: 444 - protein, 729 aa, Artificial Sequence
  source: /note="Description of Artificial Sequence: Synthetic polypeptide"
MAADGYLPDWLEDNLSEGIREWWDLKPGAPKPKANQQKQDDGRGLVLPGYKYLGPFNGLDKGEPVNAADAAALEHDKAYDQQLKAGDNPYLRYNHADAEFQERLQEDTSFGGNLGRAVFQAKKRVLEPLGLVEEGAKTAPGKKRPIDSPDSSTGIGKKGQQPAKKKLNFGQTGDSESVPDPQPLGEPPAAPSSVGSGTMAAGGGAPTADNNEGADGVGNASGNWHCDSTWLGDRVITTSTRTWALPTYNNHLYKQISSSSSGATNDNHYFGYSTPWGYFDFNRFHCHFSPRDWQRLINNNWGFRPKKLRFKLFNIQVKEVTTNDGVTTIANNLTSTVQVFSDSEYQLPYVLGSAHQGCLPPFPADVFMIPQYGYLTLNNGSQSVGRSSFYCLEYFPSQMLRTGNNFEFSYSFEDVPFHSSYAHSQSLDRLMNPLIDQYLYYLARTQSTTGSTRELQFHQAGPNTMAEQSKNWLPGPCYRQQRLSKNLDFNNNSNFAWTAATKYHLNGRNSLTNPGIPMATNKDDEDQFFPINGVLVFGKTGAANKTTLENVLMTSEEEIKTTNPVATEEYGVVSSNLQSSTAGPQSQTINSQGALPGMVWQNRDVYLQGPIWAKIPHTDGNFHPSPLMGGFGLKHPPPQILIKNTPVPANPPEVFTPAKFASFITQYSTGQVSVEIEWELQKENSKRWNPEIQYTSNYAKSNNVEFAVNPDGVYTEPRPIGTRYLTRNL

SEQ ID NO: 445 - protein, 729 aa, Artificial Sequence
  source: /note="Description of Artificial Sequence: Synthetic polypeptide"
MAADGYLPDWLEDNLSEGIREWWDLKPGAPKPKANQQKQDDGRGLVLPGYKYLGPFNGLDKGEPVNAADAAALEHDKAYDQQLKAGDNPYLRYNHADAEFQERLQEDTSFGGNLGRAVFQAKKRVLEPLGLVEEGAKTAPGKKRPIDSPDSSTGIGKKGQQPAKKKLNFGQTGDSESVPDPQPLGEPPAAPSSVGSGTMAAGGGAPMADNNEGADGVGNASGNWHCDSTWLGDRVITTSTRTWALPTYNNHLYKQISSSSSGATNDNHYFGYSTPWGYFDFNRFHCHFSPRDWQRLINNNWGFRPKKLRFKLFNIQVKEVTTNDGVTTIANNLTSTVQVFSDSEYQLPYVLGSAHQGCLPPFPADVFMIPQYGYLTLNNGSQSVGRSSFYCLEYFPSQMLRTGNNFEFSYSFEDVPFHSSYAHSQSLDRLMNPLIDQYLYYLARTQSTTGSTRELQFHQAGPNTMAEQSKNWLPGPCYRQQRLSKNLDFNNNSNFAWTAATKYHLNGRNSLTNPGIPMATNKDDEDQFFPINGVLVFGKTGAANKTTLENVLMTSEEEIKTTNPVATEEYGVVSSNLQSSTAGPQSQTINSQGALPGMVWQNRDVYLQGPIWAKIPHTDGNFHPSPLMGGFGLKHPPPQILIKNTPVPANPPEVFTPAKFASFITQYSTGQVSVEIEWELQKENSKRWNPEIQYTSNYAKSNNVEFAVNPDGVYTEPRPIGTRYLTRNL

SEQ ID NO: 446 - DNA, 2217 bp, Artificial Sequence
  source: /note="Description of Artificial Sequence: Synthetic polynucleotide"
atggctgctgacggttatcttccagattggctcgaggacaacctctctgagggcattcgcgagtggtgggacctgaaacctggagcccccaagcccaaggccaaccagcagaagcaggacgacggccggggtctggtgcttcctggctacaagtacctcggacccttcaacggactcgacaagggggagcccgtcaacgcggcggacgcagcggccctcgagcacgacaaggcctacgaccagcagctcaaagcgggtgacaatccgtacctgcggtataaccacgccgacgccgagtttcaggagcgtctacaagaagatacgtcttttgggggcaacctcgggcgagcagtcttccaggccaagaagcgggttctcgaacctctcggtctggttgaggaagctgctaagacggctcctggaaagaagagaccggtagaaccgtcacctcagcgttcccccgactcctccacgggcatcggcaagaaaggccagcggcccgctaaaaagagactgaactttggtcagactggcgactcagagtcagtccccgaccctcaaccaatcggagaaccaccagcaggcccctctggtctgggatctggtacaatggctgcaggcggtggcgctccaatggcagacaataacgaaggcgccgacggagtgggtagttcctcaggaaattggcattgcgattccacatggctgggcgacagagtcatcaccaccagcacccgaacctgggccctgcccacctacaacaaccacctctacaagcaaatatccaatgggacatcgggaggaagcaccaacgacaacacctacttcggctacagcaccccctgggggtattttgacttcaacagattccactgccacttctcaccacgtgactggcagcgactcatcaacaacaactggggattccggccaaaaagactcagcttcaagcccttcaacatccaggtcaaggaggtcacgcagaatgaaggcaccaagaccatcgccaataaccttaccagcacgattcaggtatttacggactcggaataccagctgccgtacgtcctcggctccgcgcaccagggctgcctgcctccgttcccggcggacgtcttcatgattccccagtacggctaccttacactgaacaatggaagtcaagccgtaggccgttcctccttctactgcctggaatattttccatctcaaatgctgcgaactggaaacaattttgaattcagctacaccttcgaggacgtgcctttccacagcagctacgcacacagccagagcttggaccgactgatgaatcctctcatcgaccagtacctgcactacttatccagaactcagtccacaggaggaactcaaggtacccagcaattgttattttctcaagctgggcctgcaaacatgtcggctcaggctaagaactggctacctggaccttgctaccggcagcagcgagtctctacgacactgtcgcaaaacaacaacagcaactttgcttggactggtgccaccaaatatcacctgaacggaagagactctttggtaaatcccggtgtcgccatggcaacccacaaggacgacgaggaacgcttcttcccgtcgagtggagtcctgatgtttggaaaacagggtgctggaagagacaatgtggactacagcagcgttatgctaaccagcgaagaagaaattaaaaccactaaccctgtagccacagaacaatacggtgtggtggctgacaacttgcagcaaaccaatacagggcctattgtgggaaatgtcaacagccaaggagccttacctggcatggtctggcagaaccgagacgtgtacctgcagggtcccatctgggccaagattcctcacacggacggcaacttccacccttcaccgctaatgggaggatttggactgaagcacccacctcctcagatcctgatcaagaacacgccggtacctgcggatcctccaacaacgttcagccaggcgaaattggcttccttcattacgcagtacagcaccggacaggtcagcgtggaaatcgagtgggagctgcagaaggagaacagcaaacgctggaacccagagattcagtacacttcaaactactacaaatctacaaatgtggactttgctgtcaatacagagggaacttattctgagcctcgccccattggtactcgctacctcacccgtaatctgtaa

SEQ ID NO: 447 - protein, 738 aa, Artificial Sequence
  source: /note="Description of Artificial Sequence: Synthetic polypeptide"
MAADGYLPDWLEDNLSEGIREWWDLKPGAPKPKANQQKQDDGRGLVLPGYKYLGPFNGLDKGEPVNAADAAALEHDKAYDQQLKAGDNPYLRYNHADAEFQERLQEDTSFGGNLGRAVFQAKKRVLEPLGLVEEAAKTAPGKKRPVEPSPQRSPDSSTGIGKKGQRPAKKRLNFGQTGDSESVPDPQPIGEPPAGPSGLGSGTMAAGGGAPMADNNEGADGVGSSSGNWHCDSTWLGDRVITTSTRTWALPTYNNHLYKQISNGTSGGSTNDNTYFGYSTPWGYFDFNRFHCHFSPRDWQRLINNNWGFRPKRLSFKPFNIQVKEVTQNEGTKTIANNLTSTIQVFTDSEYQLPYVLGSAHQGCLPPFPADVFMIPQYGYLTLNNGSQAVGRSSFYCLEYFPSQMLRTGNNFEFSYTFEDVPFHSSYAHSQSLDRLMNPLIDQYLHYLSRTQSTGGTQGTQQLLFSQAGPANMSAQAKNWLPGPCYRQQRVSTTLSQNNNSNFAWTGATKYHLNGRDSLVNPGVAMATHKDDEERFFPSSGVLMFGKQGAGRDNVDYSSVMLTSEEEIKTTNPVATEQYGVVADNLQQTNTGPIVGNVNSQGALPGMVWQNRDVYLQGPIWAKIPHTDGNFHPSPLMGGFGLKHPPPQILIKNTPVPADPPTTFSQAKLASFITQYSTGQVSVEIEWELQKENSKRWNPEIQYTSNYYKSTNVDFAVNTEGTYSEPRPIGTRYLTRNL

SEQ ID NO: 448 - DNA, 2217 bp, Artificial Sequence
  source: /note="Description of Artificial Sequence: Synthetic polynucleotide"
atggctgctgacggttatcttccagattggctcgaggacaacctctctgagggcattcgcgagtggtgggacctgaaacctggagcccccaagcccaaggccaaccagcagaagcaggacgacggccggggtctggtgcttcctggctacaagtacctcggacccttcaacggactcgacaagggggagcccgtcaacgcggcggacgcagcggccctcgagcacgacaaggcctacgaccagcagctcaaagcgggtgacaatccgtacctgcggtataaccacgccgacgccgagtttcaggagcgtctgcaagaagatacgtcttttgggggcaacctcgggcgagcagtcttccaggccaagaagcgggttctcgaacctctcggtctggttgaggaagctgctaagacggctcctggaaagaagagaccggtagaaccgtcacctcagcgttcccccgactcctccacgggcatcggcaagaaaggccagcagcccgctaaaaagagactgaactttggtcagactggcgactcagagtcagtccccgaccctcaaccaatcggagaaccaccagcaggcccctctggtctgggatctggtacaatggctgcaggcggtggcgctccaatggcagacaataacgaaggcgccgacggagtgggtagttcctcaggaaattggcattgcgattccacatggctgggcgacagagtcatcaccaccagcacccgaacctgggccctgcccacctacaacaaccacctctacaagcaaatatccaatgggacatcgggaggaagcaccaacgacaacacctacttcggctacagcaccccctgggggtattttgacttcaacagattccactgccacttctcaccacgtgactggcagcgactcatcaacaacaactggggattccggccaaaaagactcagcttcaagctcttcaacatccaggtcaaggaggtcacgcagaatgaaggcaccaagaccatcgccaataaccttaccagcacgattcaggtatttacggactcggaataccagctgccgtacgtcctcggctccgcgcaccagggctgcctgcctccgttcccggcggacgtcttcatgattccccagtacggctaccttacactgaacaatggaagtcaagccgtaggccgttcctccttctactgcctggaatattttccatctcaaatgctgcgaactggaaacaattttgaattcagctacaccttcgaggacgtgcctttccacagcagctacgcacacagccagagcttggaccgactgatgaatcctctcatcgaccagtacctgtactacttatccagaactcagtccacaggaggaactcaaggtacccagcaattgttattttctcaagctgggcctgcaaacatgtcggctcaggctaagaactggctacctggaccttgctaccggcagcagcgagtctctacgacactgtcgcaaaacaacaacagcaactttgcttggactggtgccaccaaatatcacctgaacggaagagactctttggtaaatcccggtgtcgccatggcaacccacaaggacgacgaggaacgcttcttcccgtcgagtggagtcctgatgtttggaaaacagggtgctggaagagacaatgtggactacagcagcgttatgctaaccagcgaagaagaaattaaaaccactaaccctgtagccacagaacaatacggtgtggtggctgataacttgcagcaaaccaatacggggcctattgtgggaaatgtcaacagccaaggagccttacctggcatggtctggcagaaccgagacgtgtacctgcagggtcccatctgggccaagattcctcacacggacggcaacttccacccttcaccgctaatgggaggatttggactgaagcacccacctcctcagatcctgatcaagaacacgccggtacctgcggatcctccaacaacgttcagccaggcgaaattggcttccttcattacgcagtacagcaccggacaggtcagcgtggaaatcgagtgggagctgcagaaggagaacagcaaacgctggaacccagagattcagtacacttcaaactactacaaatctacaaatgtggactttgctgtcaatacagagggaacttattctgagcctcgccccattggtactcgttacctcacccgtaatctgtaa

SEQ ID NO: 449 - protein, 738 aa, Artificial Sequence; identical to SEQ ID NO: 101
  source: /note="Description of Artificial Sequence: Synthetic polypeptide"

SEQ ID NO: 450 - protein, 738 aa, Artificial Sequence
  source: /note="Description of Artificial Sequence: Synthetic polypeptide"
MAADGYLPDWLEDNLSEGIREWWDLKPGAPKPKANQQKQDDGRGLVLPGYKYLGPFNGLDKGEPVNAADAAALEHDKAYDQQLKAGDNPYLRYNHADAEFQERLQEDTSFGGNLGRAVFQAKKRVLEPLGLVEEAAKTAPGKKRPVEPSPQRSPDSSTGIGKKGQQPAKKRLNFGQTGDSESVPDPQPIGEPPAGPSGLGSGTMAAGGGAPMADNNEGADGVGSSSGNWHCDSTWLGDRVITTSTRTWALPTYNNHLYKQISNGTSGGSTNDNTYFGYSTPWGYFDFNRFHCHFSPRDWQRLINNNWGFRPKRLSFKLFNIQVKEVTQDEGTKTIANNLTSTIQVFTDSEYQLPYVLGSAHQGCLPPFPADVFMIPQYGYLTLNNGSQAVGRSSFYCLEYFPSQMLRTGNNFEFSYTFEDVPFHSSYAHSQSLDRLMNPLIDQYLYYLSRTQSTGGTQGTQQLLFSQAGPANMSARAKNWLPGPCYRQQRVSTTLSQNNNSNFAWTGATKYHLNGRDSLVNPGVAMATHKDDEERFFPSSGVLMFGKQGAGRDNVDYSSVMLTSEEEIKTTNPVATEQYGVVADNLQQANTGPIVGNVNSQGALPGMVWQNRDVYLQGPIWAKIPHTDGNFHPSPLMGGFGLKHPPPQILIKNTPVPADPPTTFSQAKLASFITQYSTGQVSVEIEWELQKENSKRWNPEIQYTSNYYKSTNVDFAVNSEGTYSEPRPIGTRYLTRNL

SEQ ID NO: 451 - DNA, 2217 bp, Artificial Sequence
  source: /note="Description of Artificial Sequence: Synthetic polynucleotide"
atggctgctgacggttatcttccagattggctcgaggacaacctctctgagggcattcgcgagtggtgggacctgaaacctggagcccccaagcccaaggccaaccagcagaagcaggacgacggccggggtctggtgcttcctggctacaagtacctcggacccttcaacggactcgacaagggggagcccgtcaacgcggcggacgcagcggccctcgagcacgacaaggcctacgaccagcagctcaaagcgggtgacaatccgtacctgcggtataaccacgccgacgccgagtttcaggagcgtctgcaagaagatacgtcttttgggggcaacctcgggcgagcagtcttccaggccaagaagcgggttctcgaacctctcggtctggttgaggaagctgctaagacggctcctggaaagaagagaccggtagaaccgtcacctcagcgttcccccgactcctccacgggcatcggcaagaaaggccagcagcccgctaaaaagagactgaactttggtcagactggcgactcagagtcagtccccgaccctcaaccaatcggagaaccaccagcaggcccctctggtctgggatctggtacaatggctgcaggcggtggcgctccaatggcagacaataacgaaggcgccgacggagtgggtagttcctcaggaaattggcattgcgattccacatggctgggcgacagagtcatcaccaccagcacccgaacctgggccctgcccacctacaacaaccacctctacaagcaaatatccaatgggacatcgggaggaagcaccaacgacaacacctacttcggctacagcaccccctgggggtattttgacttcaacagattccactgccacttctcaccacgtgactggcagcgactcatcaacaacaactggggattccggccaaaaagactcagcttcaagctcttcaacatccaggtcaaggaggtcacgcaggatgaaggcaccaagaccatcgccaataaccttaccagcacgattcaggtatttacggactcggaataccagctgccgtacgtcctcggctccgcgcaccagggctgcctgcctccgttcccggcggacgtcttcatgattccccagtacggctaccttacactgaacaatggaagtcaagccgtaggccgttcctccttctactgcctggaatattttccatctcaaatgctgcgaactggaaacaattttgaattcagctacaccttcgaggacgtgcctttccacagcagctacgcacacagccagagcttggaccgactgatgaatcctctcatcgaccagtacctgtactacttatccagaactcagtccacaggaggaactcaaggtacccagcaattgttattttctcaagctgggcctgcaaacatgtcggctcgggctaagaactggctacctggaccttgctaccggcagcagcgagtctctacgacactgtcgcaaaacaacaacagcaactttgcttggactggtgccaccaaatatcacctgaacggaagagactctttggtaaatcccggtgttgctatggcaacgcataaggacgacgaggaacgtttctttccatcgagcggagtcctgatgtttggaaaacagggtgctggaagagacaatgtggactatagcagcgttatgctaaccagcgaggaagaaattaaaaccactaaccctgtagccacagaacaatacggtgtggtggctgacaacttgcagcaagccaatacagggcctattgtgggaaatgtcaacagccaaggagccttacctggcatggtctggcagaaccgagacgtgtacctgcagggtcccatctgggccaaaattcctcacacggacggcaattttcacccgtctcctctgatgggcggctttggactgaagcacccacctccccagatcctgatcaagaatacgccggtacctgcggatcctccaacgacgttcagccaggcaaaattggcttccttcatcacgcagtacagcaccggccaggtcagcgtggagatcgagtgggagctgcagaaggagaacagcaagcgatggaacccagaaattcagtacacttccaactactacaaatctacaaatgtggactttgctgtcaattctgagggtacatattcagagcctcgccccattggtactcgttatctgacacgtaatctgtaa

SEQ ID NO: 452 - DNA, 2211 bp, Artificial Sequence
  source: /note="Description of Artificial Sequence: Synthetic polynucleotide"
atggctgccgatggttatcttccagattggctcgaggacaacctctctgagggcattcgcgagtggtgggacttgaaacctggagccccgaaacccaaagccaaccagcaaaagcaggacgacggccggggcctggtgcttcctggctacaagtacctcggacccttcaacggactcgacaagggggagcccgtcaacgcggcggacgcagcggccctcgagcacgacaaggcctacgaccagcagctcgaagcgggtgacaatccgtacctgcggtataaccacgccgacgccgagtttcaggagcgtctgcaagaagatacgtcttttgggggcaacctcgggcgagcagtcttccaggccaagaagcgggttctcgaacctctcggtctggttgaggaaggcgctaagacggctcctggaaagaagagaccagtagagcagtcaccccaagaaccagactcctcctcgggcatcggcaagaaaggccaacagcccgccagaaaaagactcaattttggccagactggcgactcagagtcagttccagaccctcaacctctcggagaacctccagcagcgccctctggtgtgggacctaatacaatggctgcaggcggtggcgcaccaatggcagacaataacgaaggcgccgacggagtgggtagttcctcgggaaattggcattgcgattccacatggctgggcgacagagtcatcaccaccagcacccgaacctgggccctgcccacctacaacaaccacctctacaagcaaatctccaacgggacatcgggaggagccaccaacgacaacacctacttcggctacagcaccccctgggggtattttgactttaacagattccactgccacttttcaccacgtgactggcagcgactcatcaacaacaactggggattccggcccaagagactcagcttcaagctcttcaacatccaggtcaaggaggtcacgcagaatgaaggcaccaagaccatcgccaataacctcaccagcaccatccaggtgtttacggactcggagtaccagctgccgtacgttctcggctctgcccaccagggctgcctgcctccgttcccggcggacgtgttcatgattccccagtacggctacctaacactcaacaacggtagtcaggccgtgggacgctcctccttctactgcctggaatactttccttcgcagatgctgagaaccggcaacaacttccagtttacttacaccttcgaggacgtgcctttccacagcagctacgcccacagccagagcttggaccggctgatgaatcctctgattgaccagtacctgtactacttgtctcggactcaaacaacaggaggcacggcaaatacgcagactctgggcttcagccaaggtgggcctaatacaatggccaatcaggcaaagaactggctgccaggaccctgttaccgccaacaacgcgtctcaacgacaaccgggcaaaacaacaatagcaactttgcctggactgctgggaccaaataccatctgaatggaagaaattcattggctaatcctggcatcgctatggcaacacacaaagacgacgaggagcgttttttcccagtaacgggatcctgtttttggcaacaaaatgctgccagagacaatgcggattacagcgatgtcatgctcaccagcgaggaagaaatcaaaaccactaaccctgtggctacagaggaatacggtatcgtggcagataacttgcagcagcaaaacacggctcctcaaattggaactgtcaacagccagggggccttacccggtatggtctggcagaaccgggacgtgtacctgcagggtcccatctgggccaagattcctcacacggacggcaacttccacccgtctccgctgatgggcggctttggcctgaaacatcctccgcctcagatcctgatcaagaacacgcctgtacctgcggatcctccgaccaccttcaaccagtcaaagctgaactctttcatcacgcaatacagcaccggacaggtcagcgtggaaattgaatgggagctacagaaggaaaacagcaagcgctggaaccccgagatccagtacacctccaactactacaaatctacaagtgtggactttgctgttaatacagaaggcgtgtactctgaaccccgccccattggcacccgttacctcacccgtaatctgtaa

SEQ ID NO: 453 - protein, 736 aa, Artificial Sequence
  source: /note="Description of Artificial Sequence: Synthetic polypeptide"
MAADGYLPDWLEDNLSEGIREWWDLKPGAPKPKANQQKQDDGRGLVLPGYKYLGPFNGLDKGEPVNAADAAALEHDKAYDQQLEAGDNPYLRYNHADAEFQERLQEDTSFGGNLGRAVFQAKKRVLEPLGLVEEGAKTAPGKKRPVEQSPQEPDSSSGIGKKGQQPARKRLNFGQTGDSESVPDPQPLGEPPAAPSGVGPNTMAAGGGAPMADNNEGADGVGSSSGNWHCDSTWLGDRVITTSTRTWALPTYNNHLYKQISNGTSGGATNDNTYFGYSTPWGYFDFNRFHCHFSPRDWQRLINNNWGFRPKRLSFKLFNIQVKEVTQNEGTKTIANNLTSTIQVFTDSEYQLPYVLGSAHQGCLPPFPADVFMIPQYGYLTLNNGSQAVGRSSFYCLEYFPSQMLRTGNNFQFTYTFEDVPFHSSYAHSQSLDRLMNPLIDQYLYYLSRTQTTGGTANTQTLGFSQGGPNTMANQAKNWLPGPCYRQQRVSTTTGQNNNSNFAWTAGTKYHLNGRNSLANPGIAMATHKDDEERFFPVTGSCFWQQNAARDNADYSDVMLTSEEEIKTTNPVATEEYGIVADNLQQQNTAPQIGTVNSQGALPGMVWQNRDVYLQGPIWAKIPHTDGNFHPSPLMGGFGLKHPPPQILIKNTPVPADPPTTFNQSKLNSFITQYSTGQVSVEIEWELQKENSKRWNPEIQYTSNYYKSTSVDFAVNTEGVYSEPRPIGTRYLTRNL

SEQ ID NO: 454 - DNA, 2214 bp, Artificial Sequence
  source: /note="Description of Artificial Sequence: Synthetic polynucleotide"
atggctgctgacggttatcttccagattggctcgaggacaacctctctgagggcattcgcgagtggtgggacctgaaacctggagcccccaagcccaaggccaaccagcagaagcaggacgacggccggggtctggtgcttcctggctacaagtacctcggacccttcaacggactcgacaagggggagcccgtcagcgcggcggacgcagcggccctcgagcacgacaaggcctgcgaccagcggctcaaagcgggtgacaatccgtacctgcggtataaccacgccgacgccgagtttcaggagcgtctgcaagaagatacgtcttttgggggcaacctcgggcgagcagtcttccaggccaagaagcgggttctcgaacctctcggtctggttgaggaagctgctaagacggctcctggaaagaagggaccggtagaaccgtcacctcagcgttcccccgactcctccacgggcatcggcaagaaaggccagcagcccgctagaaagagactgaactttgggcagactggcgactcagagtcagtccccgaccctcaaccaatcggagaaccaccagcaggcccctctggtctgggatctggtacaatggctgcaggcggtggcgcaccaatggctgacaataacgagggcgccgacggagtgggtaatgcctcaggaaattggcattgcgattccacatggctgggcgacagagtcatcaccaccagcacccgaacctgggctttgcccacctacaacaatcacctctacaagcaaatctccagtcagtcagcaggtagcaccaacgacaacgtctacttcggctacagcaccccctgggggtattttgacttcaacagattccactgtcacttctcaccacgtgactggcagcggctcatcaacaacaactggggattccggcccaagaagctcaacttcaagctgttcaacatccaggtcaaggaggtcacaacgaatgacggcgtcacgaccatcgccaataaccttaccagcacggttcaggtcttttcggactcggaataccagctgccctacgtcctcggctccgcacaccagggctgcctgcctccgttcccggcggacgtcttcatgattccccagtacggctacctgactctgaacaatggcagccaatcggtgggtcgttcctctttctactgcctggaatatttcccttctcaaatgctgagaacgggcaacaacttcaccttcagctacaccttcgaggacgttcccttccacagcagctacgcacacagccagagcctggaccggctgatgaatcctcttatcgaccagtacctgtattacctggccagaacacagagcaacgcaggaggcacagctggcaatcgggaactgcagttttatcagggcgggcctaccaccatggccgaacaagccaaaaactggctgcctggaccttgcttccggcaacaaagagtctccaagacgctggatcaaaacaacaacagcaactttgcttggactggtgccaccaaataccatctaaatggaagaaattcattggttaatcccggtgtcgccatggcaacccacaaggacgacgaggaacgcttcttcccttcgagcggagtcctgatttttggaaaaactggagcagctaataagactacactggaaaatgtgttaatgacaaatgaagaggaaattcgtcctaccaacccggtagccaccgaggaatacgggactgttagcagcaacctgcaggcggctaacactgcagcccagacacaagttgtcaacaaccagggagccttacctggtatggtctggcagaaccgggacgtgtacctgcagggtcccatctgggccaagattcctcacacggacggcaactttcacccgtctccgctgatgggcggctttggactgaagcatccgcctcctcagatcctgatcaaaaacactcctgttcctgctaatcccccggaggtgtttacgcctgccaagtttgcttctttcatcacacagtacagcaccggccaggtcagcgtggagatcgagtgggagctgcagaaggagaacagcaagcgctggaacccagagattcagtatacctccaattttgacgaacagactggtgtggactttgccgttgacagccagggtgtttattctgagcctcgccccattggtactcgttacctcacccgtaatctgtaa

SEQ ID NO: 455 - protein, 737 aa, Artificial Sequence
  source: /note="Description of Artificial Sequence: Synthetic polypeptide"
MAADGYLPDWLEDNLSEGIREWWDLKPGAPKPKANQQKQDDGRGLVLPGYKYLGPFNGLDKGEPVSAADAAALEHDKACDQRLKAGDNPYLRYNHADAEFQERLQEDTSFGGNLGRAVFQAKKRVLEPLGLVEEAAKTAPGKKGPVEPSPQRSPDSSTGIGKKGQQPARKRLNFGQTGDSESVPDPQPIGEPPAGPSGLGSGTMAAGGGAPMADNNEGADGVGNASGNWHCDSTWLGDRVITTSTRTWALPTYNNHLYKQISSQSAGSTNDNVYFGYSTPWGYFDFNRFHCHFSPRDWQRLINNNWGFRPKKLNFKLFNIQVKEVTTNDGVTTIANNLTSTVQVFSDSEYQLPYVLGSAHQGCLPPFPADVFMIPQYGYLTLNNGSQSVGRSSFYCLEYFPSQMLRTGNNFTFSYTFEDVPFHSSYAHSQSLDRLMNPLIDQYLYYLARTQSNAGGTAGNRELQFYQGGPTTMAEQAKNWLPGPCFRQQRVSKTLDQNNNSNFAWTGATKYHLNGRNSLVNPGVAMATHKDDEERFFPSSGVLIFGKTGAANKTTLENVLMTNEEEIRPTNPVATEEYGTVSSNLQAANTAAQTQVVNNQGALPGMVWQNRDVYLQGPIWAKIPHTDGNFHPSPLMGGFGLKHPPPQILIKNTPVPANPPEVFTPAKFASFITQYSTGQVSVEIEWELQKENSKRWNPEIQYTSNFDEQTGVDFAVDSQGVYSEPRPIGTRYLTRNL

SEQ ID NO: 456 - DNA, 2214 bp, Artificial Sequence
  source: /note="Description of Artificial Sequence: Synthetic polynucleotide"
atggctgccgatggttatcttccagattggctcgaggacaacctctctgagggcattcgcgagtggtgggacctgaaacctggagccccgaaacccaaagccaaccagcaaaagcaggacgacggccggggtctggtgcttcctggctacaagtacctcggacccttcaacggactcgacaagggggagcccgtcaacgcggcggacgcagcggccctcgagcacgacaaggcctacgaccagcagctcaaagcgggtgacaatccgtacctgcggtataaccacgccgacgccgagtttcaggagcgtctgcaagaagatacgtcttttgggggcaacctcgggcgagcagtcttccaggccaagaagcgggttctcgaacctctcggtctggttgaggaagctgctaagacggctcctggaaagaagagaccggtagaaccgtcacctcagcgttcccccgactcctccacgggcatcggcaagaaaggccagcagcccgctagaaagagactgaactttgggcagactggcgactcagagtcagtccccgaccctcaaccaatcggagaaccaccagcaggcccctctggtctgggatctggtacaatggctgcaggcggtggcgctccaatggcagacaataacgaaggcgccgacggagtgggtaatgcctcaggaaattggcattgcgattccacatggctgggcgacagagtcatcaccaccagcacccgaacctgggctttgcccacctacaacaaccacctctacaagcaaatctccagtcagtcagcaggtagcaccaacgacaacgtctacttcggctacagcaccccctgggggtattttgacttcaacagattccactgtcacttctcaccacgtgactggcagcggctcatcaacaacaactggggattccggcccaagaagctcaacttcaagctgttcaacatccaggtcaaggaggtcacaacgaatgacggcgtcacgaccatcgccaataaccttaccagcacggttcaggtcttttcggactcggaataccagctgccctacgtcctcggctccgcacaccagggctgcctgcctccgttcccggcggacgtcttcatgattcctcagtacggctacctgactctcaacaacggtagtcaggccgtgggacgttcctccttctactgcctggagtacttcccctctcagatgctgagaacgggcaacaacttttccttcagctacactttcgaggacgtgcctttccacagcagctacgcgcacagccagagtttggacaggctgatgaatcctctcatcgaccagtacctgtactacctgtcaagaacccagtctacgggaggcacagcgggaacccagcagttgctgttttctcaggccgggcctagcaacatgtcgactcaggccagaaactggctgcctggaccctgctacagacagcagcgcgtctccacgacactgtcgcaaaacaacaacagcaactttgcctggactggtgccaccaagtatcatctgaacggcagagactctctggtgaatccgggcgtcgccatggcaaccaacaaggacgacgaggaccgcttcttcccatccagcggcatcctcatgtttggcaagcagggagctggaaaagacaacgtggactatagcaacgtgatgctaaccagcgaggaagaaatcaagaccaccaaccccgtggccacagaacagtatggcgtggtggctgataacctacagcagcaaaacaccgctcctattgtgggggccgtcaacagccagggagccttacctggcatggtctggcagaaccgggacgtgtacctgcagggtcctatttgggccaagattcctcacacagatggcaactttcacccgtctcctttaatgggcggctttggacttaaacatccgcctcctcagatccttatcaaaaacactcctgttcctgcggatcctccaacagcgttcaaccaggccaagctgaattctttcatcacgcagtacagcaccggacaagtcagcgtggagatcgagtgggagctgcagaaggagaacagcaagcgctggaacccagagattcagtatacttccaactactacaaatctacaaatgtggactttgctgttaatactgagggtgcttactctgagcctcgccccattggcactcgttacctcacccgtaatctgtaa

SEQ ID NO: 457 - protein, 737 aa, Artificial Sequence
  source: /note="Description of Artificial Sequence: Synthetic polypeptide"
MAADGYLPDWLEDNLSEGIREWWDLKPGAPKPKANQQKQDDGRGLVLPGYKYLGPFNGLDKGEPVNAADAAALEHDKAYDQQLKAGDNPYLRYNHADAEFQERLQEDTSFGGNLGRAVFQAKKRVLEPLGLVEEAAKTAPGKKRPVEPSPQRSPDSSTGIGKKGQQPARKRLNFGQTGDSESVPDPQPIGEPPAGPSGLGSGTMAAGGGAPMADNNEGADGVGNASGNWHCDSTWLGDRVITTSTRTWALPTYNNHLYKQISSQSAGSTNDNVYFGYSTPWGYFDFNRFHCHFSPRDWQRLINNNWGFRPKKLNFKLFNIQVKEVTTNDGVTTIANNLTSTVQVFSDSEYQLPYVLGSAHQGCLPPFPADVFMIPQYGYLTLNNGSQAVGRSSFYCLEYFPSQMLRTGNNFSFSYTFEDVPFHSSYAHSQSLDRLMNPLIDQYLYYLSRTQSTGGTAGTQQLLFSQAGPSNMSTQARNWLPGPCYRQQRVSTTLSQNNNSNFAWTGATKYHLNGRDSLVNPGVAMATNKDDEDRFFPSSGILMFGKQGAGKDNVDYSNVMLTSEEEIKTTNPVATEQYGVVADNLQQQNTAPIVGAVNSQGALPGMVWQNRDVYLQGPIWAKIPHTDGNFHPSPLMGGFGLKHPPPQILIKNTPVPADPPTAFNQAKLNSFITQYSTGQVSVEIEWELQKENSKRWNPEIQYTSNYYKSTNVDFAVNTEGAYSEPRPIGTRYLTRNL

SEQ ID NO: 458 - DNA, 2217 bp, Artificial Sequence
  source: /note="Description of Artificial Sequence: Synthetic polynucleotide"
atggctgccgatggttatcttccagattggctcgaggacaacctctctgagggcattcgcgagtggtgggacctgaaacctggagccccgaaacccaaagccaaccagcaaaagcaggacgacggccggggtctggtgcttcctggctacaagtacctcggacccttcaacggactcgacaagggggagcccgtcaacgcggcggacgcagcggccctcgagcacgacaaggcctacgaccagcagctcaaagcgggtgacaatccgtacctgcggtataatcacgccgacgccgagtttcaggagcgtctgcaagaagatacgtcttttgggggcaacctcgggcgagcagtcttccaggccaagaagcgggttctcgaacctctcggtctggttgaggaaggcgctaagacggctcctggaaagaagagaccggtagagccgtcaccacagcgttcccccgactcctccacgggcatcggcaagaaaggccagcagcccgccagaaagagactcaatttcggtcagactggcgactcagagtcagtccccgaccctcaacctatcggagaacctccagcagcgccctctagtgtgggatctggtacaatggctgcaggcggtggcgcaccaatggcagacaataacgaaggtgccgacggagtgggtagttcctcgggaaattggcattgcgattccacatggctgggcgacagagtcatcaccaccagcacccgaacctgggccctgcccacctacaacaaccacctctacaagcaaatctccaacgggacctcgggaggcagcaccaacgacaacacctactttggctacagcaccccctgggggtattttgactttaacagattccactgccacttctcaccacgtgactggcagcgactcatcaacaacaactggggattccggcccaagagactcagcttcaagctcttcaacatccaggtcaaagaggtcacgcagaatgaaggcaccaagaccatcgccaataacctcaccagcaccatccaggtgtttacggactcggaataccagctgccgtacgtcctcggctctgcccaccagggctgcctgcctccgttcccggcggacgtcttcatgattcctcagtacggctacctgactctcaacaacggtagtcaggccgtgggacgttcctccttctactgcctggagtacttcccctctcagatgctgagaacgggcaacaacttttccttcagctacactttcgaggacgtgcctttccacagcagctacgcgcacagccagagtttggacaggctgatgaatcctctcatcgaccagtacctgtactacctgtcaagaacccagtctacgggaggcacagcgggaacccagcagttgctgttttctcaggccgggcctagcaacatgtcggctcaggccagaaactggctgcctggaccctgctacagacagcagcgcgtctccacgacactgtcgcaaaacaacaacagcaactttgcctggactggtgccaccaagtatcatctgaacggcagagactctctggtgaatccgggcgtcgccatggcaaccaacaaggacgacgaggaccgcttcttcccatccagcggcatcctcatgtttggcaagcagggagctggaaaagacaacgtggactatagcaacgtgatgctaaccagcgaggaagaaatcaaggccaccaaccccgtggccacagaacagtatggcgtggtggctgataacctacagcagcaaaacaccgctcctattgtgggggccgtcaacagccagggagccttacctggcatggtctggcagaaccgggacgtgtacctgcagggtcctatttgggccaagattcctcacacagatggcaactttcacccgtctcctttaatgggcggctttggacttaaacatccgcctcctcagatcctcatcaaaaacactcctgttcctgcggatcctccaacagcgttcaaccaggccaagctgaattctttcatcacgcagtacagcaccggacaagtcagcgtggagatcgagtgggagctgcagaaggagaacagcaagcgctggaacccagagattcagtatacttccaactactacaaatctacaaatgtggactttgctgttaatactgagggtgtttactctgagcctcgccccattggcactcgttacctcacccgtaatctgtaa

SEQ ID NO: 459 - protein, 738 aa, Artificial Sequence
  source: /note="Description of Artificial Sequence: Synthetic polypeptide"
MAADGYLPDWLEDNLSEGIREWWDLKPGAPKPKANQQKQDDGRGLVLPGYKYLGPFNGLDKGEPVNAADAAALEHDKAYDQQLKAGDNPYLRYNHADAEFQERLQEDTSFGGNLGRAVFQAKKRVLEPLGLVEEGAKTAPGKKRPVEPSPQRSPDSSTGIGKKGQQPARKRLNFGQTGDSESVPDPQPIGEPPAAPSSVGSGTMAAGGGAPMADNNEGADGVGSSSGNWHCDSTWLGDRVITTSTRTWALPTYNNHLYKQISNGTSGGSTNDNTYFGYSTPWGYFDFNRFHCHFSPRDWQRLINNNWGFRPKRLSFKLFNIQVKEVTQNEGTKTIANNLTSTIQVFTDSEYQLPYVLGSAHQGCLPPFPADVFMIPQYGYLTLNNGSQAVGRSSFYCLEYFPSQMLRTGNNFSFSYTFEDVPFHSSYAHSQSLDRLMNPLIDQYLYYLSRTQSTGGTAGTQQLLFSQAGPSNMSAQARNWLPGPCYRQQRVSTTLSQNNNSNFAWTGATKYHLNGRDSLVNPGVAMATNKDDEDRFFPSSGILMFGKQGAGKDNVDYSNVMLTSEEEIKATNPVATEQYGVVADNLQQQNTAPIVGAVNSQGALPGMVWQNRDVYLQGPIWAKIPHTDGNFHPSPLMGGFGLKHPPPQILIKNTPVPADPPTAFNQAKLNSFITQYSTGQVSVEIEWELQKENSKRWNPEIQYTSNYYKSTNVDFAVNTEGVYSEPRPIGTRYLTRNL

SEQ ID NO: 460 - DNA, 2217 bp, Artificial Sequence
  source: /note="Description of Artificial Sequence: Synthetic polynucleotide"
atggctgccgatggttatcttccagattggctcgaggacaacctctctgagggcattcgcgagtggtgggacctgaaacctggagccccgaaacccaaagccaaccagcaaaagcaggacgacggccggggtctggtgcttcctggctacaagcacctcggacccttcaacggactcgacaagggggagcccgtcaacgcggcggacgcagcggccctcgagcacgacaaggcctacgaccagcagctcaaagcgggtgacaatccgtacctgcggtataatcacgctgacgccgagtttcaggagcgtctgcaagaagatacgtcttttgggggcaacctcgggcgagcagtcttccaggccaagaagcgggttctcgaacctctcggtctggttgaggaaggcgctaagacggctcctggaaagaagagaccggtagagccgtcaccacagcgttcccccgactcctccacgggcatcggcaagaaaggccagcagcccgccagaaagagactcaatttcggtcagactggcgactcagagtcagtccccgaccctcaacctatcggagaacctccagcagcgccctctagtgtgggatctggtacaatggctgcaggcggtggcgcaccaatggcagacaataacgaaggtgccgacggagtgggtagttcctcgggaaattggcattgcgattccacatggctgggcgacagagtcatcaccaccagcacccgaacctgggccctgcccacctacaacaaccacctctacaagcaaatctccaacgggacctcgggaggcagcaccaacgacaacacctactttggctacagcaccccctgggggtattttgactttaacagattccactgccacttctcaccacgtgactggcagcgactcatcaacaacaactggggattccggcccaagagactcagcttcaagctcttcaacatccaggtcaaagaggtcacgcagaatgaaggcaccaagaccatcgccaataaccttaccagcacggttcaggtcttttcggactcggaataccagctgccctacgtcctcggctccgcacaccagggctgcctgcctccgttcccggcggacgtcttcatgattccccagtacggctacctgactctgaacaatggcagccaatcggtgggtcgttcctctttctactgcctggaatatttcccttctcaaatgctgagaacgggcaacaacttcaccttcagctacaccttcgaggacgttcccttccacagcagctacgcacacagccagagcctggaccggctgatgaatcctcttatcgaccagtacctgtattacctggccagaacacagagcaacgcaggaggcacagctggcaatcgggaactgcagttttatcagggcgggcctaccaccatggccgaacaagccaaaaactggctgcctggaccttgcttccggcaacaaagagtctccaagacgctggatcaaaacaacaacagcaactttgcttggactggtgccaccaaataccatctaaatggaagaaattcattggttaatcccggtgtcgccatggcaacccacaaggacgacgaggaacgcttcttcccttcgagcggagtcctgatttttggaaaaactggagcagctaataagactacactggaaaatgtgttaatgacaaatgaagaggaaattcgtcctaccaacccggtagccaccgaggaatacgggactgttagcagcaacctgcaggcggctaacactgcagcccagacacaagttgtcaacaaccagggagccttacctggtatggtctggcagaaccgggacgtgtacctgcagggtcccatctgggccaagattcctcacacggacggcaactttcacccgtctccgctgatgggcggctttggactgaagcatccgcctcctcagatcctgatcaaaaacactcctgttcctgctaatcccccggaggtgtttacgcctgccaagtttgcttctttcatcacacagtacagcaccggccaggtcagcgtggagatcgagtgggagctgcagaaggagaacagcaagcgctggaacccagagattcagtatacctccaattttgacaaacagactggtgtggactttgccgttgacagccagggtgtttattctgagcctcgccccattggtactcgttacctcacccgtaatctgtaa

SEQ ID NO: 461 - protein, 738 aa, Artificial Sequence
  source: /note="Description of Artificial Sequence: Synthetic polypeptide"
MAADGYLPDWLEDNLSEGIREWWDLKPGAPKPKANQQKQDDGRGLVLPGYKHLGPFNGLDKGEPVNAADAAALEHDKAYDQQLKAGDNPYLRYNHADAEFQERLQEDTSFGGNLGRAVFQAKKRVLEPLGLVEEGAKTAPGKKRPVEPSPQRSPDSSTGIGKKGQQPARKRLNFGQTGDSESVPDPQPIGEPPAAPSSVGSGTMAAGGGAPMADNNEGADGVGSSSGNWHCDSTWLGDRVITTSTRTWALPTYNNHLYKQISNGTSGGSTNDNTYFGYSTPWGYFDFNRFHCHFSPRDWQRLINNNWGFRPKRLSFKLFNIQVKEVTQNEGTKTIANNLTSTVQVFSDSEYQLPYVLGSAHQGCLPPFPADVFMIPQYGYLTLNNGSQSVGRSSFYCLEYFPSQMLRTGNNFTFSYTFEDVPFHSSYAHSQSLDRLMNPLIDQYLYYLARTQSNAGGTAGNRELQFYQGGPTTMAEQAKNWLPGPCFRQQRVSKTLDQNNNSNFAWTGATKYHLNGRNSLVNPGVAMATHKDDEERFFPSSGVLIFGKTGAANKTTLENVLMTNEEEIRPTNPVATEEYGTVSSNLQAANTAAQTQVVNNQGALPGMVWQNRDVYLQGPIWAKIPHTDGNFHPSPLMGGFGLKHPPPQILIKNTPVPANPPEVFTPAKFASFITQYSTGQVSVEIEWELQKENSKRWNPEIQYTSNFDKQTGVDFAVDSQGVYSEPRPIGTRYLTRNL

SEQ ID NO: 462 - protein, 737 aa, Artificial Sequence
  source: /note="Description of Artificial Sequence: Synthetic polypeptide"
MAADGYLPDWLEDNLSEGIREWWDLKPGAPKPKANQQKQDDGRGLVLPGYKYLGPFNGLDKGEPVNAADAAALEHDKAYDQQLKAGDNPYLRYNHADAEFQERLQEDTSFGGNLGRAVFQAKKRVLEPLGLVEEAAKTAPGKKRPVEPSPQRSPDSSTGIGKKGQQPARKRLNFGQTGDSESVPDPQPIGEPPAGPSGLGSGTMAAGGGAPMADNNKGADGVGNASGNWHCDSTWLGDRVITTSTRTWALPTYNNHLYKQISSQSAGSTNDNVYFGYSTPWGYFDFNRFHCHFSPRDWQRLINSNWGFRPKKLNFKLFNIQVKEVTTNDGVTTIANNLTSTVQVFSDSEYQLPYVLGSAHQGCLPPFPADVFMIPQYGYLTLNNGSQSVGRSSFYCLEYFPSQMLRTGNNFTFSYTFEDVPFHSSYAHSQSLDRLMNPLIDQYLYYLARTQSNAGGTAGNRELQFYQGGPTTMAEQAKNWLPGPCFRQQRVSKTLDQNNNSNFAWTGATKYHLNGRNSLVNPGVAMATHKDDEERFFPSSGVLIFGKTGAANKTTLENVLMTNEEEIRPTNPVATEEYGTVSSNLQAANTAAQTQVVNNQGALPGMVWQNRDVYLQGPIWAKIPHTDGNFHPSPLMGGFGLKHPPPQILIKNTPVPANPPEVFTPAKFASFITQYSTGQVSVEIEWELQKENSKRWNPEIQYTSNFDKQTGVDFAVDSQGVYSEPRPIGTRYLTRNL

SEQ ID NO: 463 - protein, 737 aa, Artificial Sequence
  source: /note="Description of Artificial Sequence: Synthetic polypeptide"
MAADGYLPDWLEDNLSEGIREWWDLKPGAPKPKANQQKQDDGRGLVLPGYKYLGPFNGLDKGEPVNAADAAALEHDKAYDQQLKAGDNPYLRYNHADAEFQERLQEDTSFGGNLGRAVFQAKKRVLEPLGLVEEAAKTAPGKKRPVEPSPQRSPDSSTGIGKKGQQPARKRLNFGQTGDSESVPDPQPIGEPPAGPSGLGSGTMAAGGGAPMADNNEGADGVGNASGNWHCDSTWLGDRVITTSTRTWALPTYNNHLYKQISSQSAGSTNDNVYFGYSTPWGYFDFNRFHCHFSPRDWQRLINSNWGFRPKKLNFKLFNIQVKEVTTNDGVTTIANNLTSTVQVFSDSEYQLPYVLGSAHQGCLPPFPADVFMIPQYGYLTLNNGSQSVGRSSFYCLEYFPSQMLRTGNNFTFSYTFEDVPFHSSYAHSQSLDRLMNPLIDQYLYYLARTQSNAGGTAGNRELQFYQGGPTTMAEQAKNWLPGPCFRQQRVSKTLDQNNNSNFAWTGATKYHLNGRNSLVNPGVAMATHKDDEERFFPSSGVLIFGKTGAANKTTLENVLMTNEEEIRPTNPVATEEYGTVSSNLQAANTAAQTQVVNNQGALPGMVWQNRDVYLQGPIWAKIPHTDGNFHPSPLMGGFGLKHPPPQILIKNTPVPANPPEVFTPAKFASFITQYSTGQVSVEIEWELQKENSKRWNPEIQYTSNFDKQTGVDFAVDSQGVYSEPRPIGTRYLTRNL

SEQ ID NO: 464 - protein, 737 aa, Artificial Sequence
  source: /note="Description of Artificial Sequence: Synthetic polypeptide"
MAADGYLPDWLEDNLSEGIREWWDLKPGAPKPKANQQKQDDGRGLVLPGYKYLGPFNGLDKGEPVNAADAAALEHDKAYDQQLKAGDNPYLRYNHADAEFQERLQEDTSFGGNLGRAVFQAKKRVLEPLGLVEEAAKTAPGKKRPVEPSPQRSPDSSTGIGKKGQQPARKRLNFGQTGDSESVPDPQPIGEPPAGPSGLGSGTMAAGGGAPMADNNEGADGVGNASGNWHCDSTWLGDRVITTSTRTWALPTYNNHLYKQISSQSAGSTNDNVYFGYSTPWGYFDFNRFHCHFSPRDWQRLINNNWGFRPKKLNFKLFNIQVKEVTTNDGVTTIANNLTSTVQVFSDSEYQLPYVLGSAHQGCLPPFPADVFMIPQYGYLTLNNGSQSVGRSSFYCLEYFPSQMLRTGNNFTFSYTFEDVPFHSSYAHSQSLDRLMNPLIDQYLYYLARTQSNAGGTAGNRELQFYQGGPTTMAEQAKNWLPGPCFRQQRVSKTLDQNNNSNFAWTGATKYHLNGRNSLVNPGVAMATHKDDEERFFPSSGVLIFGKTGAANKTTLENVLMTNEEEIRPTNPVATEEYGTVSSNLQAANTAAQTQVVNNQGALPGMVWQNRDVYLQGPIWAKIPHTDGNFHPSPLMGGFGLKHPPPQILIKNTPVPANPPEVFTPAKFASFITQYSTGQVSVEIEWELQKENSKRWNPEIQYTSNFDKQTGVDFAVDSQGVYSEPRPIGTRYLTRNL

SEQ ID NO: 465 - protein, 737 aa, Artificial Sequence
  source: /note="Description of Artificial Sequence: Synthetic polypeptide"
MAADGYLPDWLEDNLSEGIREWWDLKPGAPKPKANQQKQDDGRGLVLPGYKYLGPFNGLDKGEPVNAADAAALEHDKAYDQQLKAGDNPYLRYNHADAEFQERLQEDTSFGGNLGRAVFQAKKRVLEPLGLVEEAAKTAPGKKRPVEPSPQRSPDSSTGIGKKGQQPARKRLNFGQTGDSESVPDPQPIGEPPAGPSGLGSGTMAAGGGAPMADNNKGADGVGNASGNWHCDSTWLGDRVITTSTRTWALPTYNNHLYKQISSQSAGSTNDNVYFGYSTPWGYFDFNRFHCHFSPRDWQRLINNNWGFRPKKLNFKLFNIQVKEVTTNDGVTTIANNLTSTVQVFSDSEYQLPYVLGSAHQGCLPPFPADVFMIPQYGYLTLNNGSQSVGRSSFYCLEYFPSQMLRTGNNFTFSYTFEDVPFHSSYAHSQSLDRLMNPLIDQYLYYLARTQSNAGGTAGNRELQFYQGGPTTMAEQAKNWLPGPCFRQQRVSKTLDQNNNSNFAWTGATKYHLNGRNSLVNPGVAMATHKDDEERFFPSSGVLIFGKTGAANKTTLENVLMTNEEEIRPTNPVATEEYGTVSSNLQAANTAAQTQVVNNQGALPGMVWQNRDVYLQGPIWAKIPHTDGNFHPSPLMGGFGLKHPPPQILIKNTPVPANPPEVFTPAKFASFITQYSTGQVSVEIEWELQKENSKRWNPEIQYTSNFDKQTGVDFAVDSQGVYSEPRPIGTRYLTRNL

SEQ ID NO: 466 - DNA, 2214 bp, Artificial Sequence
  source: /note="Description of Artificial Sequence: Synthetic polynucleotide"
atggctgctgacggttatcttccagattggctcgaggacaacctctctgagggcattcgcgagtggtgggacctgaaacctggagcccccaagcccaaggccaaccagcagaagcaggacgacggccggggtctggtgcttcctggctacaagtacctcggacccttcaacggactcgacaagggggagcccgtcaacgcggcggacgcagcggccctcgagcacgacaaggcctacgaccagcagctcaaagcgggtgacaatccgtacctgcggtataaccacgccgacgccgagtttcaggagcgtctgcaagaagatacgtcttttgggggcaacctcgggcgagcagtcttccaggccaagaagcgggttctcgaacctctcggtctggttgaggaagctgctaagacggctcctggaaagaagagaccggtagaaccgtcacctcagcgttcccccgactcctccacgggcatcggcaagaaaggccagcagcccgctagaaagagactgaactttgggcagactggcgactcagagtcagtccccgaccctcaaccaatcggagaaccaccagcaggcccctctggtctgggatctggtacaatggctgcaggcggtggcgcaccaatggctgacaataacaagggcgccgacggagtgggtaatgcctcaggaaattggcattgcgattccacatggctgggcgacagagtcatcaccaccagcacccgaacctgggctttgcccacctacaacaaccacctctacaagcaaatctccagtcagtcagcaggtagcaccaacgacaacgtctacttcggctacagcaccccctgggggtattttgacttcaacagattccactgtcacttctcaccacgtgactggcagcggctcatcaacagcaactggggattccggcccaagaagctcaacttcaagctgttcaacatccaggtcaaggaggtcacaacgaatgacggcgtcacgaccatcgccaataaccttaccagcacggttcaggtcttttcggactcggaataccagctgccctacgtcctcggctccgcacaccagggctgcctgcctccgttcccggcggacgtcttcatgattccccagtacggctacctgactctgaacaatggcagccaatcggtgggtcgttcctctttctactgcctggaatatttcccttctcaaatgctgagaacgggcaacaacttcaccttcagctacaccttcgaggacgttcccttccacagcagctacgcacacagccagagcctggaccggctgatgaatcctcttatcgaccagtacctgtattacctggccagaacacagagcaacgcaggaggcacagctggcaatcgggaactgcagttttatcagggcgggcctaccaccatggccgaacaagccaaaaactggctgcctggaccttgcttccggcaacaaagagtctccaagacgctggatcaaaacaacaacagcaactttgcttggactggtgccaccaaataccatctaaatggaagaaattcattggttaatcccggtgtcgccatggcaacccacaaggacgacgaggaacgcttcttcccttcgagcggagtcctgatttttggaaaaactggagcagctaataagactacactggaaaatgtgttaatgacaaatgaagaggaaattcgtcctaccaacccggtagccaccgaggaatacgggactgttagcagcaacctgcaggcggctaacactgcagcccagacacaagttgtcaacaaccagggagccttacctggtatggtctggcagaaccgggacgtgtacctgcagggtcccatctgggccaagattcctcacacggacggcaactttcacccgtctccgctgatgggcggctttggactgaagcatccgcctcctcagatcctgatcaaaaacactcctgttcctgctaatcccccggaggtgtttacgcctgccaagtttgcttctttcatcacacagtacagcaccggccaggtcagcgtggagatcgagtgggagctgcagaaggagaacagcaagcgctggaacccagagattcagtatacctccaattttgacaaacagactggtgtggactttgccgttgacagccagggtgtttattctgagcctcgccccattggtactcgttacctcacccgtaatctgtaa

SEQ ID NO: 467 - DNA, 2217 bp, Artificial Sequence
  source: /note="Description of Artificial Sequence: Synthetic polynucleotide"
atggctgccgatggttatcttccagattggctcgaggacaacctctctgagggcattcgcgagtggtgggacctgaaacctggagccccgaaacccaaagccaaccagcaaaagcaggacgacggccggggtctggtgcttcctggctacaagtacctcggacccttcaacggactcgacaagggggagcccgtcaacgcggcggacgcagcggccctcgagcacgacaaggcctacgaccagcagctcaaagcgggtgacaatccgcacctgcggtataatcacgccgacgccgagtttcaggagcgtctgcaagaagatacgtcttttgggggcaacctcgggcgagcagtcttccaggccaagaagcgggttctcgaacctctcggtctggttgaggaaggcgctaagacggctcctggaaagaagagaccggtagagccgtcaccacagcgttcccccgactcctccacgggcatcggcaagaaaggccagcagcccgccagaaagagactcaatttcggtcagactggcgactcagagtcagtccccgaccctcaacttatcggagaacctccagcagcgccctctagtgtgggatctggtacaatggctgcaggcggtggcgcaccaatggcagacaataacgaaggtgccgacggagtgggtagttcctcgggaaattggcattgcgattccacatggctgggcgacagagtcatcaccaccagcacccgaacctgggccctgcccacctacaacaaccacctctacaagcaaatctccaacgggacctcgggaggcagcaccaacgacaacacctactttggctacagcaccccctgggggtattttgactttaacagattccactgccacttctcaccacgtgactggcagcgactcatcaacaacaactggggattccggcccaagagactcagcttcaagctcttcaacatccaggtcaaagaggtcacgcagaatgaaggcaccaagaccatcgccaataacctcaccagcaccatccaggtgtttacggactcggagtaccagctgccgtacgtcctcggctctgcccaccagggctgcctgcctccgttcccggcggacgtcttcatgattcctcagtacggcaacctgactctcaacaacggtagtcaggccgtgggacgttcctccttctactgcctggagtacttcccctctcagatgctgagaacgggcaacaacttttccttcagctacactttcgaggacgtgcctttccacagcagctacgcgcacagccagagtttggacaggctgatgaatcctctcatcgaccagtacctgtactacctgtcaagaacccagtctacgggaggcacagcgggaacccagcagttgctgttttctcaggccgggcctagcaacatgtcggctcaggccagaaactggctgcctggaccctgctacagacagcagcgcgtctccacgacactgtcgcaaaacaacaacagcaactttgcctggactggtgccaccaagtatcatctgaacggcagagactctctggtgaatccgggcgtcgccatggcaaccaacaaggacgacgaggaccgcttcttcccatccagcggcatcctcatgtttggcaagcagggagctggaaaagacaacatgggctatagcaacgtgatgctaaccagcgaggaagaaatcaagaccaccaaccccgtggccacagaacagtatggcgtggtggctgataacctacagcagcaaaacaccgctcctattgtgggggccgtcaacagccagggagccttacctggcatggtctggcagaaccgggacgtgtacctgcagggtcctatttgggccaagattcctcacacagatggcaactttcacccgtctcctttaatgggcggctttggacttaaacatccgcctcctcagatcctcatcaaaaacactcctgttcctgcggatcctccaacagcgttcaaccaggccaagctgaattctttcatcacgcagtacggcaccggacaagtcagcgtggagatcgagtgggagctgcagaaggagaacagcaagcgctggaacccagagattcagtatacttccaactactacaaatctacaaatgtggactttgctgttaatactgagggtgtttactctgagcctcgccccattggcactcgttacctcacccgtaatctgtaa

SEQ ID NO: 468 - protein, 738 aa, Artificial Sequence
  source: /note="Description of Artificial Sequence: Synthetic polypeptide"
MAADGYLPDWLEDNLSEGIREWWDLKPGAPKPKANQQKQDDGRGLVLPGYKYLGPFNGLDKGEPVNAADAAALEHDKAYDQQLKAGDNPHLRYNHADAEFQERLQEDTSFGGNLGRAVFQAKKRVLEPLGLVEEGAKTAPGKKRPVEPSPQRSPDSSTGIGKKGQQPARKRLNFGQTGDSESVPDPQLIGEPPAAPSSVGSGTMAAGGGAPMADNNEGADGVGSSSGNWHCDSTWLGDRVITTSTRTWALPTYNNHLYKQISNGTSGGSTNDNTYFGYSTPWGYFDFNRFHCHFSPRDWQRLINNNWGFRPKRLSFKLFNIQVKEVTQNEGTKTIANNLTSTIQVFTDSEYQLPYVLGSAHQGCLPPFPADVFMIPQYGNLTLNNGSQAVGRSSFYCLEYFPSQMLRTGNNFSFSYTFEDVPFHSSYAHSQSLDRLMNPLIDQYLYYLSRTQSTGGTAGTQQLLFSQAGPSNMSAQARNWLPGPCYRQQRVSTTLSQNNNSNFAWTGATKYHLNGRDSLVNPGVAMATNKDDEDRFFPSSGILMFGKQGAGKDNMGYSNVMLTSEEEIKTTNPVATEQYGVVADNLQQQNTAPIVGAVNSQGALPGMVWQNRDVYLQGPIWAKIPHTDGNFHPSPLMGGFGLKHPPPQILIKNTPVPADPPTAFNQAKLNSFITQYGTGQVSVEIEWELQKENSKRWNPEIQYTSNYYKSTNVDFAVNTEGVYSEPRPIGTRYLTRNL

SEQ ID NO: 469 - DNA, 2217 bp, Artificial Sequence
  source: /note="Description of Artificial Sequence: Synthetic polynucleotide"
atggctgccgatggttatcttccagattggctcgaggacaacctctctgagggcattcgcgagtggtgggacctgaaacctggagccccgaaacccaaagccaaccagcaaaagcaggacgacggccggggtctggtgcttcctggctacaagtacctcggacccttcaacggactcgacaagggggagcccgtcaacgcggcggacgcagcggccctcgagcacgacaaggcctacgaccagcagctcaaagcgggtgacaatccgtacctgcggtataatcacgccgacgccgagtttcaggagcgtctgcaagaagatacgtcttttgggggcaacctcgggcgagcagtcttccaggccaagaagcgggttctcgaacctctcggtctggttgaggaaggcgctaagacggctcctggaaagaagagaccggtagagccgtcaccacagcgttcccccgactcctccacgggcatcggcaagaaaggccagcagcccgccggaaagagactcaatttcggtcagactggcgactcagagtcagtccccgaccctcaacctatcggagaacctccagcagcgccctctagtgtgggatctggtacaatggctgcaggcggtggcgcaccaatggcagacaataacgaaggtgccgacggagtgggtagttcctcgggaaattggcattgcgattccacatggctgggcgacagagtcatcaccaccagcacccgaacctgggccctgcccacctacaacaaccacctctacaagcaaatctccaacgggacctcgggaggcagcaccaacgacaacacctactttggctacagcaccccctgggggtattttgactttaacagattccactgccacttctcaccacgtgactggcagcgactcatcaacaacaactggggattccggcccaagagactcagcttcaagctcttcaacatccaggtcaaagaggtcacgcagaatgaaggcaccaagaccatcgccaataacctcaccagcaccatccaggtgtttacggactcggaataccagctgccgtacgtcctcggctctgcccaccagggctgcctgcctccgttcccggcggacgtcttcatgattcctcagtacggctacctgactctcaacaacggtagtcaggccgtgggacgttcctccttctactgcctggagtacttcccctctcagatgctgagaacgggcaacaacttttccttcagctacactttcgaggacgtgcctttccacagcagctacgcgcacagccagagtttggacaggctgatgaatcctctcgtcgaccagtacctgtactacctgtcaagaacccagtctacgggaggcacagcgggaacccagcagttgctgttttctcaggccgggcctagcaacatgtcggctcaggccagaaactggctgcctggaccctgctacagacagcagcgcgtctccacgacactgtcgcaaaacaacaacagcaactttgcctggactggtgccaccaagtatcatctgaacggcagagactctctggtgaatccgggcgtcgccatggcaaccaacaaggacgacgaggaccgcttcttcccatccagcggcatcctcatgtttggcaagcagggagctggaaaagacaacgtggactatagcaacgtgatgctaaccagcgaggaagaaatcaagaccaccaaccccgtggccacagaacagtatggcgtggtggctgataacctacagcagcaaaacaccgctcctattgtgggggccgtcaacagccagggagccttacctggcatggtctggcagaaccgggacgtgtacctgcagggtcctatttgggccaagattcctcacacagatggcaactttcacccgtctcctttaatgggcggctttggacttaaacatccgcctcctcagatcctcatcaaaaacactcctgttcctgcggatcctccaacagcgttcaaccaggccaagctgaattctttcatcacgcagtacagcaccggacaagtcagcgtggagatcgagtgggagctgcagaaggagaacagcaagcgctggagcccagagattcagtatacttccaactactacaaatctacaaatgtggactttgctgttaatactgagggtgtttactctgagcctcgccccattggcactcgttacctcacccgtaatctgtaa

SEQ ID NO: 470 - protein, 738 aa, Artificial Sequence
  source: /note="Description of Artificial Sequence: Synthetic polypeptide"
MAADGYLPDWLEDNLSEGIREWWDLKPGAPKPKANQQKQDDGRGLVLPGYKYLGPFNGLDKGEPVNAADAAALEHDKAYDQQLKAGDNPYLRYNHADAEFQERLQEDTSFGGNLGRAVFQAKKRVLEPLGLVEEGAKTAPGKKRPVEPSPQRSPDSSTGIGKKGQQPAGKRLNFGQTGDSESVPDPQPIGEPPAAPSSVGSGTMAAGGGAPMADNNEGADGVGSSSGNWHCDSTWLGDRVITTSTRTWALPTYNNHLYKQISNGTSGGSTNDNTYFGYSTPWGYFDFNRFHCHFSPRDWQRLINNNWGFRPKRLSFKLFNIQVKEVTQNEGTKTIANNLTSTIQVFTDSEYQLPYVLGSAHQGCLPPFPADVFMIPQYGYLTLNNGSQAVGRSSFYCLEYFPSQMLRTGNNFSFSYTFEDVPFHSSYAHSQSLDRLMNPLVDQYLYYLSRTQSTGGTAGTQQLLFSQAGPSNMSAQARNWLPGPCYRQQRVSTTLSQNNNSNFAWTGATKYHLNGRDSLVNPGVAMATNKDDEDRFFPSSGILMFGKQGAGKDNVDYSNVMLTSEEEIKTTNPVATEQYGVVADNLQQQNTAPIVGAVNSQGALPGMVWQNRDVYLQGPIWAKIPHTDGNFHPSPLMGGFGLKHPPPQILIKNTPVPADPPTAFNQAKLNSFITQYSTGQVSVEIEWELQKENSKRWSPEIQYTSNYYKSTNVDFAVNTEGVYSEPRPIGTRYLTRNL

SEQ ID NO: 471 - DNA, 2217 bp, Artificial Sequence
  source: /note="Description of Artificial Sequence: Synthetic polynucleotide"
atggttgccgatggttatcttccagattggctcgaggacaacctctctgagggcattcgcgagtggtgggacctgaaacctggagccccgaaacccaaagccaaccagcaaaagcagggcgacggccggggtctggtgcttcctggctacaagtacctcggacccttcaacggactcgacaagggggagcccgtcaacgcggcggacgcagcggccctcgagcacgacaaggcctacgaccagcagcttaaagcgggtgacaatccgtacctgcggtataatcacgccgacgccgagcttcaggagcgtctgcaagaagatacgtcttttgggggcaacctcgggcgagcagtcttccaggccaagaagcgggttctcgaacctctcggtctggttgaggaaggcgctaagacggctcctggaaagaagagaccggtagagccgtcaccacagcgttcccccgactcctccacgggcatcggcaagaaaggccagcagcccgccagaaagagactcaatttcggtcagactggcgactcagagtcagtccccgaccctcaacctatcggagaacctccagcagcgccctctagtgtgggatctggtacaatggctgcaggcggtggcgcgccaatggcagacaataacgaaggtgccgacggagtgggtagttcctcgggaaattggcattgcgattccacatggctgggcgacagagtcatcaccaccagcacccgaacctgggccctgcccacctacaacaaccacctctacaagcaaatctccaacgggacctcgggaggcagcaccaacgacaacacctactttggctacagcaccccctgggggtattttgactttaacagattccactgccacttctcaccacgtgactggcagcgactcatcaacaacaactggggattccggcccaagagactcagcttcaagctcttcaacatccaggtcaaagaggtcacgcagaatgaaggcaccaagaccatcgccaataacctcaccagcaccatccaggtgtttacggactcggaataccagctgccgtacgtcctcggctctgcccaccagggctgccagcctccgttcccggcggacgtcttcatgattcctcagtacggctacctgactctcaacaacggtagtcaggccgtgggacgttcctccttctactgcctggagtacttcccctctcagatgctgagaacgggcaacaacttttccttcagctacactttcgaggacgtgcctttccacagcagctacgcgcacagccagagtttggacaggctgatgaatcctctcatcgaccagtacctgtactacctgtcaagaacccagtctacgggaggcacagcgggaacccagcagttgctgttttctcaggccgggcctagcaacatgtcggctcaggccagaaactggctgcctggaccctgctacagacagcagcgcgtctccacgacactgtcgcaaaacaacaacagcaactttgcctggactggtgccaccaagtatcatctgaacggcagagactctctggtgaatccgggcgtcgccatggcaaccaacaaggacgacgaggaccgcttcttcccatccagcggcatcctcatgtttggcaagcagggagctggaaaagacaacgtggactatagcaacgtgatgctaaccagcgaggaagaaatcaagaccaccaaccccgtggccacagaacagtatggcgtggtggctgataacctacagcagcaaaacaccgctcctattgtgggggccgtcaacagccagggagccttacctggcatggtctggcagaaccgggacgtgtacctgcagggtcctatttgggccaagattcctcacacagatggcaactttcacccgtctcctttaatgggcggctttggacttaaacatccgcctcctcagatcctcatcaaaaacactcctgttcctgcggatcctccaacagcgttcaaccaggccaagctgaattctttcatcacgcagtacagcaccggacaagtcagcgtggagatcgagtgggagccgcagaaggagaacagcaagcgctggaacccagagattcagtatacttccaactactacaaatctacaaatgtggactttgctgttaatactgagggtgtttactctgagcctcgccccattggcactcgttacctcacccgtaatctgtaa

SEQ ID NO: 472 - protein, 738 aa, Artificial Sequence
  source: /note="Description of Artificial Sequence: Synthetic polypeptide"
MVADGYLPDWLEDNLSEGIREWWDLKPGAPKPKANQQKQGDGRGLVLPGYKYLGPFNGLDKGEPVNAADAAALEHDKAYDQQLKAGDNPYLRYNHADAELQERLQEDTSFGGNLGRAVFQAKKRVLEPLGLVEEGAKTAPGKKRPVEPSPQRSPDSSTGIGKKGQQPARKRLNFGQTGDSESVPDPQPIGEPPAAPSSVGSGTMAAGGGAPMADNNEGADGVGSSSGNWHCDSTWLGDRVITTSTRTWALPTYNNHLYKQISNGTSGGSTNDNTYFGYSTPWGYFDFNRFHCHFSPRDWQRLINNNWGFRPKRLSFKLFNIQVKEVTQNEGTKTIANNLTSTIQVFTDSEYQLPYVLGSAHQGCQPPFPADVFMIPQYGYLTLNNGSQAVGRSSFYCLEYFPSQMLRTGNNFSFSYTFEDVPFHSSYAHSQSLDRLMNPLIDQYLYYLSRTQSTGGTAGTQQLLFSQAGPSNMSAQARNWLPGPCYRQQRVSTTLSQNNNSNFAWTGATKYHLNGRDSLVNPGVAMATNKDDEDRFFPSSGILMFGKQGAGKDNVDYSNVMLTSEEEIKTTNPVATEQYGVVADNLQQQNTAPIVGAVNSQGALPGMVWQNRDVYLQGPIWAKIPHTDGNFHPSPLMGGFGLKHPPPQILIKNTPVPADPPTAFNQAKLNSFITQYSTGQVSVEIEWEPQKENSKRWNPEIQYTSNYYKSTNVDFAVNTEGVYSEPRPIGTRYLTRNL

SEQ ID NO: 473 - DNA, 2217 bp, Artificial Sequence
  source: /note="Description of Artificial Sequence: Synthetic polynucleotide"
atggctgccgatggttatcttccagattggctcgaggacaacctctctgagggcattcgcgagtggtgggacctgaaacctggagccccgaaacccaaagccaaccagcaaaagcaggacgacggccggggtctggtgcttcctggctacaagtacctcggacccttcaacggactcgacaagggggagcccgtcaacgcggcggacgcagcggccctcgagcacgacaaggcctacgaccagcagctcaaagcgggtgacaatccgtacctgcggtataatcacgccgacgccgagtttcaggagcgtctgcaagaagatacgtcttttgggggcaacctcgggcgagcagtcttccaggccaagaagcgggttctcgaacctctcggtctggttgaggaaggcgctaagacggctcctggaaagaagagaccggtagagccgtcaccacagcgttcccccgactcctccacgggcatcggcaagaaaggccagcagcccgccagaaagagactcaatttcggtcagactggcgactcagagtcagtccccgaccctcaacctatcggagaacctccagcagcgccctctagtgtgggatctggtacaatggctgcaggcggtggcgcaccaatggcagacaataacgaaggtgccgacggagtgggtagttcctcgggaaattggcattgcgattccacatggctgggcgacagagtcatcaccaccagcacccgaacctgggccctgcccacctacaacaaccacctctacaagcaaatctccaacgggacctcgggaggcagcaccaacgacaacacctactttggctacagcaccccctgggggtattttgactttaacagattccactgccacttctcaccacgtgactggcagcgactcatcaacaacaactggggattccggcccaagagactcagcttcaagctcttcaacatccaggtcaaagaggtcacgcagaatgaaggcaccaagaccatcgccaatagcctcaccagcaccatccaggtgtttacggactcggaataccagctgccgtacgtcctcggctctgcccaccagggctgcctgcctccgttcccggcggacgtcttcatgattcctcagtacggctacctgactcccaacaacggtagtcaggccgtgggacgttcctccttctactgcctggagtacttcccctctcagatgctgagaacgggcaacaacttttccttcagctacactttcgaggacgtgcctttccacagcagctacgcgcacagccagagtttggacaggctgatgaatcctctcatcgaccagtacctgtactacctgtcaagaacccagtctacgggaggcacagcgggaacccagcagttgctgtcttctcaggccgggcctagcaacatgtcggctcaggccagaaactggctgcctggaccctgctacagacagcagcgcgtctccacgacactgtcgcaaaacaacaacagcaactttgcctggactggtgccaccaagtatcatctgaacggcagagactctctggtgaatccgggcgtcgccatggcaaccaacaaggacgacgaggaccgcttcttcccatccagcggcatcctcatgtttggcaagcagggagctggaaaagacaacgtggactatagcaacgtgatgctaaccagcgaggaagaaatcaagaccaccaaccccgtggccacagaacagtatggcgtggtggctgataacctacagcagcaaaacaccgctcctattgtgggggccgtcaacagccagggagccttacctggcatggtctggcagaaccgggacgtgtacttgcagggtcctatttgggccaagattcctcacacagatggcaactttcacccgtctcctttaatgggcggctttggacttaaacatccgcctcctcagatcctcatcaaaaacactcctgttcctgcggatcctccaacagcgttcaaccaggccaagctgaattctttcatcacgcagtacagcaccggacaagtcagcgtggagatcgagtgggagctgcagaaggagaacagcaagcgctggaacccagagattcagtatacttccaactactacaaatctacaaatgtggactttgctgttaatactgagggtgtttactctgagcctcgccccattggcactcgttacctcacccgtaatctgtaa

SEQ ID NO: 474 - protein, 738 aa, Artificial Sequence
  source: /note="Description of Artificial Sequence: Synthetic polypeptide"
MAADGYLPDWLEDNLSEGIREWWDLKPGAPKPKANQQKQDDGRGLVLPGYKYLGPFNGLDKGEPVNAADAAALEHDKAYDQQLKAGDNPYLRYNHADAEFQERLQEDTSFGGNLGRAVFQAKKRVLEPLGLVEEGAKTAPGKKRPVEPSPQRSPDSSTGIGKKGQQPARKRLNFGQTGDSESVPDPQPIGEPPAAPSSVGSGTMAAGGGAPMADNNEGADGVGSSSGNWHCDSTWLGDRVITTSTRTWALPTYNNHLYKQISNGTSGGSTNDNTYFGYSTPWGYFDFNRFHCHFSPRDWQRLINNNWGFRPKRLSFKLFNIQVKEVTQNEGTKTIANSLTSTIQVFTDSEYQLPYVLGSAHQGCLPPFPADVFMIPQYGYLTPNNGSQAVGRSSFYCLEYFPSQMLRTGNNFSFSYTFEDVPFHSSYAHSQSLDRLMNPLIDQYLYYLSRTQSTGGTAGTQQLLSSQAGPSNMSAQARNWLPGPCYRQQRVSTTLSQNNNSNFAWTGATKYHLNGRDSLVNPGVAMATNKDDEDRFFPSSGILMFGKQGAGKDNVDYSNVMLTSEEEIKTTNPVATEQYGVVADNLQQQNTAPIVGAVNSQGALPGMVWQNRDVYLQGPIWAKIPHTDGNFHPSPLMGGFGLKHPPPQILIKNTPVPADPPTAFNQAKLNSFITQYSTGQVSVEIEWELQKENSKRWNPEIQYTSNYYKSTNVDFAVNTEGVYSEPRPIGTRYLTRNL

SEQ ID NO: 475 - protein, 738 aa, Artificial Sequence
  source: /note="Description of Artificial Sequence: Synthetic polypeptide"
MAADGYLPDWLEDNLSEGIREWWDLKPGAPKPKANQQKQDDGRGLVLPGYKYLGPFNGLDKGEPVNAADAAALEHDKAYDQQLKAGDNPYLRYNHADAEFQERLQEDTSFGGNLGRAVFQAKKRVLEPLGLVEEGAKTAPGKKRPVEPSPQRSPDSSTGIGKKGQQPARKRLNFGQTGDSESVPDPQPIGEPPAAPSSVGSGTMAAGGGAPMADNNEGADGVGSSSGNWHCDSTWLGDRVITTSTRTWALPTYNNHLYKQISNGTSGGSTNDNTYFGYSTPWGYFDFNRFHCHFSPRDWQRLINNNWGFRPKRLSFKLFNIQVKEVTQNEGTKTIANNLTSTIQVFTDSEYQLPYVLGSAHQGCLPPFPADVFMIPQYGYLTLNNGSQAVGRSSFYCLEYFPSQMLRTGNNFSFSYTFEDVPFHSSYVHSQSLDRLMNPLIDQYLYYLSRTQSTGGTAGTQQLLFSQAGPSNMSAQARNWLPGPCYRQQRVSTTLSQNNNSNFAWTGATKYHLNGRDSLVNSGVAMATNKDDEDRFFPSSGILMFGKQGAGKDNVDYSNVMLTSEEEIKTTNPVATEQYGVVADNLQQQNTAPIVGAVNSQGALPGMVWQNRDVYLQGPIWAKIPHTDGNFHPSPLMGGFGLKHPPPQILIKNTPVPADPPTAFNQAKLNSFITQYSTGQVSVEIEWELQKENSKRWNPEIQYTSNYYKSTNVDFAVNTEGVYSEPRPIGTRYPTRNL

SEQ ID NO: 476 - DNA, 2217 bp, Artificial Sequence
  source: /note="Description of Artificial Sequence: Synthetic polynucleotide"
atggctgccgatggttatcttccagattggctcgaggacaacctctctgagggcattcgcgagtggtgggacctgaaacctggagccccgaaacccaaagccaaccagcaaaagcaggacgacggccggggtctggtgcttcctggctacaagtacctcggacccttcaacggactcgacaagggggagcccgtcaacgcggcggacgcagcggccctcgagcacgacaaggcctacgaccagcagctcaaagcgggtgacaatccgtacctgcggtataatcacgccgacgccgagtttcaggagcgtctgcaagaagatacgtcttttgggggcaacctcgggcgagcagtcttccaggccaagaagcgggttctcgaacctctcggtctggttgaggaaggcgctaagacggctcctggaaagaagagaccggtagagccgtcaccacagcgttcccccgactcctccacgggcatcggcaagaaaggccagcagcccgccagaaagagactcaatttcggtcagactggcgactcagagtcagtccccgaccctcaacctatcggagaacctccagcagcgccctctagtgtgggatctggtacaatggctgcaggcggtggcgcaccaatggcagacaataacgaaggtgccgacggagtgggtagttcctcgggaaattggcattgcgattccacatggctgggcgacagagtcatcaccaccagcacccgaacctgggccctgcccacctacaacaaccacctctacaagcaaatctccaacgggacctcgggaggcagcaccaacgacaacacctactttggctacagcaccccctgggggtattttgactttaacagattccactgccacttctcaccacgtgactggcagcgactcatcaacaacaactggggattccggcccaagagactcagcttcaagctcttcaacatccaggtcaaagaggtcacgcagaatgaaggcaccaagaccatcgccaataacctcaccagcaccatccaggtgtttacggactcggaataccagctgccgtacgtcctcggctctgcccaccagggctgcctgcctccgttcccggcggacgtcttcatgattcctcagtacggctacctgactctcaacaacggtagtcaggccgtgggacgttcctccttctactgcctggagtacttcccctctcagatgctgagaacgggcaacaacttttccttcagctacactttcgaggacgtgcctttccacagcagctacgtgcacagccagagtttggacaggctgatgaatcctctcatcgaccagtacctgtactacctgtcaagaacccagtctacgggaggcacagcgggaacccagcagttgctgttttctcaggccgggcctagcaacatgtcggctcaggccagaaactggctgcctggaccctgctacagacagcagcgcgtctccacgacactgtcgcaaaacaacaacagcaactttgcctggactggtgccaccaagtatcatctgaacggcagagactctctggtgaattcgggcgtcgccatggcaaccaacaaggacgacgaggaccgcttcttcccatccagcggcatcctcatgtttggcaagcagggagctggaaaagacaacgtggactatagcaacgtgatgctaaccagcgaggaagaaatcaagaccaccaaccccgtggccacagaacagtatggcgtggtggctgataacctacagcagcaaaacaccgctcctattgtgggggccgtcaacagccagggagccttacctggcatggtctggcagaaccgggacgtgtacctgcagggtcctatttgggccaagattcctcacacagatggcaactttcacccgtctcctttaatgggcggctttggacttaaacatccgcctcctcagatcctcatcaaaaacactcctgttcctgcggatcctccaacagcgttcaaccaggccaagctgaattctttcatcacgcagtacagcaccggacaagtcagcgtggagatcgagtgggagctgcagaaggagaacagcaagcgctggaacccagagattcagtatacttccaactactacaaatctacaaatgtggactttgctgttaatactgagggtgtttactctgagcctcgccccattggcactcgttaccccacccgtaatctgtaa

SEQ ID NO: 477 - protein, 734 aa, Artificial Sequence; identical to SEQ ID NO: 302
  source: /note="Description of Artificial Sequence: Synthetic polypeptide"

SEQ ID NO: 478 - DNA, 2214 bp, Artificial Sequence
  source: /note="Description of Artificial Sequence: Synthetic polynucleotide"
atggctgctgacggttatcttccagattggctcgaggacaacctctctgagggcattcgcgagtggtgggacctgaaacctggagccccgaaacccaaagccaaccagcagaagcaggacgacggccggggtctggtgcttcctggctacaagtacctcggacccttcaacggactcgacaagggggagcccgtcaacgcggcggacgcagcggccctcgagcacgacaaggcctacgaccagcagctcaaagcgggtgacaatccgtacctgcggtataaccacgccgacgccgagtttcaggagcgtctgcaagaagatacgtcttttgggggcaacctcgggcgagcagtcttccaggccaagaagcgggttctcgaacctctcggtctggttgaggaagctgctaagacggctcctggaaagaagagaccggtagaaccgtcacctcagcgttcccccgactcctccacgggcatcggcaagaaaggccagcagcccgctagaaagagactgaactttgggcagactggcgactcagagtcagtccccgaccctcaacctctcggagaaccaccagcaggcccctctggtctgggatctggtacaatggctgcaggcggtggcgctccaatggcagacaataacgaaggcgccgacggagtgggtaatgcctcaggaaattggcattgcgattccacatggctgggcgacagagtcatcaccaccagcacccgaacctgggctttgcccacctacaacaaccacctctacaagcaaatctccagtcagtcagcaggtagcaccaacgacaacgtctacttcggctacagcaccccctgggggtattttgacttcaacagattccactgtcacttctcaccacgtgactggcagcgactcatcaacaacaactggggattccggcccaagaagctcaacttcaagctcttcaacatccaagtcaaggaggtcacgacgaatgacggcgtcacgaccatcgctaataaccttaccagcacggttcaggtcttttcggactcggagtaccagctgccgtacgtcctcggctctgcccaccagggctgcctgcctccgttcccggcggacgtcttcatgattcctcagtacggctacctgactctgaacaatggcagccaatcggtgggacgttcatccttctactgcctggaatacttcccttctcaggtgctgagaacgggtaacaacttcaccttcagttacaccttcgaggacgtgcctttccacagcagctacgcgcacagccagagcctagaccggctgatgaatcccctcatcgaccagtacctgtattacctggctagaacacagagtaacccaggaggcacatctggcaatcgggaactgcagttttaccagggcgggccttccaccatggccgaacaagccaagaactggttacctggaccttgcttccggcaacaaagagtttccaaaacactggatcaaaacaacaacagcaactttgcttggactggtgccaccaaatatcacctgaacggcagaaactcattggtgaatcctggtgtcgccatggcaactcacaaggacgacgaggaccgctttttcccatccagcggagtcctgatttttggaaaaactggagcaaccaacaagactacattggaaaacgtgttaatgacaaatgaagaagaaattcgtcctactaatcctgtggccacagaagaatacgggatagtcagcagcaatttacaagcggccaatactgcagcccagacacaagttgtcaacaaccagggagccttacctggcatggtctggcagaaccgggacgtgtacctgcagggtcccatctgggccaaaattcctcacacagacggcaactttcacccgtctccgctgatgggcggctttggactgaagcatccgcctcctcagatcctgatcaaaaacactcctgttcctgctaatcccccggaggtgtttacgcctgccaagtttgcttctttcatcacacagtacagcaccggccaggtcagcgtggagatcgagtgggagctgcagaaggagaacagcaagcgctggaacccagagattcagtatacctccaattttgacaaacagactggtgtggactttgccgttgacagccagggtgtttattctgagcctcgccccattggtactcgttacctcacccgtaatctgtaa

SEQ ID NO: 479 - protein, 737 aa, Artificial Sequence
  source: /note="Description of Artificial Sequence: Synthetic polypeptide"
MAADGYLPDWLEDNLSEGIREWWDLKPGAPKPKANQQKQDDGRGLVLPGYKYLGPFNGLDKGEPVNAADAAALEHDKAYDQQLKAGDNPYLRYNHADAEFQERLQEDTSFGGNLGRAVFQAKKRVLEPLGLVEEAAKTAPGKKRPVEPSPQRSPDSSTGIGKKGQQPARKRLNFGQTGDSESVPDPQPLGEPPAGPSGLGSGTMAAGGGAPMADNNEGADGVGNASGNWHCDSTWLGDRVITTSTRTWALPTYNNHLYKQISSQSAGSTNDNVYFGYSTPWGYFDFNRFHCHFSPRDWQRLINNNWGFRPKKLNFKLFNIQVKEVTTNDGVTTIANNLTSTVQVFSDSEYQLPYVLGSAHQGCLPPFPADVFMIPQYGYLTLNNGSQSVGRSSFYCLEYFPSQVLRTGNNFTFSYTFEDVPFHSSYAHSQSLDRLMNPLIDQYLYYLARTQSNPGGTSGNRELQFYQGGPSTMAEQAKNWLPGPCFRQQRVSKTLDQNNNSNFAWTGATKYHLNGRNSLVNPGVAMATHKDDEDRFFPSSGVLIFGKTGATNKTTLENVLMTNEEEIRPTNPVATEEYGIVSSNLQAANTAAQTQVVNNQGALPGMVWQNRDVYLQGPIWAKIPHTDGNFHPSPLMGGFGLKHPPPQILIKNTPVPANPPEVFTPAKFASFITQYSTGQVSVEIEWELQKENSKRWNPEIQYTSNFDKQTGVDFAVDSQGVYSEPRPIGTRYLTRNL

SEQ ID NO: 480 - DNA, 2214 bp, Artificial Sequence
  source: /note="Description of Artificial Sequence: Synthetic polynucleotide"
atggctgccgatggttatcttccagattggctcgaggacaacctctctgagggcattcgcgagtggtgggacctgaaacctggagccccgaaacccaaagccaaccagcaaaagcaggacgacggccggggtctggtgcttcctggctacaagtacctcggacccttcaacggactcgacaagggggagcccgtcaacgcggcggacgcagcggccctcgagcacgacaaggcctacgaccagcagctcaaagcgggtgacaatccgtacctgcggtataatcacgccgacgccgagtttcaggagcgtctgcaagaagatacgtcttttgggggcaacctcgggcgagcagtcttccaggccaagaagcgggttctcgaacctctcggtctggttgaggaaggcgctaagacggctcctggaaagaagagaccggtagagccgtcaccacagcgttcccccgactcctccacgggcatcggcaagaaaggccagcagcccgccagaaagagactcaatttcggtcagactggcgactcagagtcagtccccgaccctcaacctatcggagaacctccagcagcgccctctagtgtgggatctggtacaatggctgcaggcggtggcgcaccaatggcagacaataacgaaggtgccgacggagtgggtagttcctcgggaaattggcattgcgattccacacggctgggcgacagagtcatcaccaccagcacccggacctgggctttgcccacctacaacaaccacctctacaagcaaatctccagtcagtcagcaggtagcaccaacgacaacgtctacttcggctacagcaccccctgggggtattttgacttcaacagattccactgtcacttctcaccacgtgactggcagcggctcatcaacaacaactggggattccggcccaagaagctcaacttcaagctgttcaacatccaggtcaaggaggtcacaacgaatgacggcgtcacgaccatcgccaataaccttaccagcacggttcaggtcttttcggactcggaataccagctgccctacgtcctcggctccgcacaccagggctgcctgcctccgttcccggcggacgtcttcatgattccccagtacggctacctgactctgaacaatggcagccaatcggtgggtcgttcctctttctactgcctggaatatttcccttctcaaatgctgagaacgggcaacaacttcaccttcagctacaccttcgaggacgttcccttccacagcagctacgcacacagccagagcctggaccggctgatgaatcctcttatcgaccagtacctgtattacctggccagaacacagagcaacgcaggaggcacagctggcaatcgggaactgcagttttatcagggcgggcctaccaccatggccgaacaagccaaaaactggctgcctggaccttgcttccggcaacgaagagtctccaagacgctggatcaaaacaacaacagcaactttgcttggactggtgccaccaaataccatctaaatggaagaaattcattggttaatcccggtgtcgccatggcaacccacaaggacgacgaggaacgcttcttcccttcgagcggagtcctgatttttggaaaaactggagcagctaataagactacactggaaaatgtgttaatgacaaatgaagaggaaattcgtcctaccaacccggtagccaccgaggaatacgggactgttagcagcaacctgcaggcggctaacactgcagcccagacacaagttgtcaacaaccagggagccttacctggtatggtctggcagaaccgggacgtgtacctgcagggtcccatctgggccaagattcctcacacggacggcaactttcacccgtctccgctgatgggcggctttggactgaagcatccgcctcctcagatcctgatcaaaaacactcctgttcctgctaatcccccggaggtgtttacgcctgccaagtttgcttctttcatcacacagtacagcaccggccaggtcagcgtggagatcgagtgggagctgcagaaggagaacagcaagcgctggaacccagagattcagtatacctccaattttgacaaacagactggtgtggactttgccgttgacagccagggtgtttattctgagcctcgccccattggtactcgttacctcacccgtaatctgtaa

SEQ ID NO: 481 - protein, 737 aa, Artificial Sequence
  source: /note="Description of Artificial Sequence: Synthetic polypeptide"
MAADGYLPDWLEDNLSEGIREWWDLKPGAPKPKANQQKQDDGRGLVLPGYKYLGPFNGLDKGEPVNAADAAALEHDKAYDQQLKAGDNPYLRYNHADAEFQERLQEDTSFGGNLGRAVFQAKKRVLEPLGLVEEGAKTAPGKKRPVEPSPQRSPDSSTGIGKKGQQPARKRLNFGQTGDSESVPDPQPIGEPPAAPSSVGSGTMAAGGGAPMADNNEGADGVGSSSGNWHCDSTRLGDRVITTSTRTWALPTYNNHLYKQISSQSAGSTNDNVYFGYSTPWGYFDFNRFHCHFSPRDWQRLINNNWGFRPKKLNFKLFNIQVKEVTTNDGVTTIANNLTSTVQVFSDSEYQLPYVLGSAHQGCLPPFPADVFMIPQYGYLTLNNGSQSVGRSSFYCLEYFPSQMLRTGNNFTFSYTFEDVPFHSSYAHSQSLDRLMNPLIDQYLYYLARTQSNAGGTAGNRELQFYQGGPTTMAEQAKNWLPGPCFRQRRVSKTLDQNNNSNFAWTGATKYHLNGRNSLVNPGVAMATHKDDEERFFPSSGVLIFGKTGAANKTTLENVLMTNEEEIRPTNPVATEEYGTVSSNLQAANTAAQTQVVNNQGALPGMVWQNRDVYLQGPIWAKIPHTDGNFHPSPLMGGFGLKHPPPQILIKNTPVPANPPEVFTPAKFASFITQYSTGQVSVEIEWELQKENSKRWNPEIQYTSNFDKQTGVDFAVDSQGVYSEPRPIGTRYLTRNL

SEQ ID NO: 482 - DNA, 2208 bp, Artificial Sequence
  source: /note="Description of Artificial Sequence: Synthetic polynucleotide"
atggctgccgatggttatcttccagattggctcgaggacactctctctgaaggaataagacagtggtggaagctcaaacctggcccaccaccaccaaagcccgcagagcggcataaggacgacagcaggggtcttgtgcttcctgggtacaagtacctcggacccttcaacggactcgacaagggggagccggtcaacgaggcagacgccgcggccctcgagcacgacaaggcctacgaccggcagctcgacagcggagacaacccgtacctcaagtacaaccacgccgacgcggagtttcaggagcgtcttaaagaagatacgtcttttgggggcaacctcggacgagcagtcttccaggcgaaaaagagggttcttgaacctctgggcctggttgaggaacctgttaagacggctccgggaaaaaagaggccggtagagcactctcctgcggagccagactcctcctcgggaaccggaaaagcgggccagcagcctgcaagaaaaagattgaattttggtcagactggagacgcagactccgtacctgacccccagcctctcggacagccaccagcagccccctctggtttgggatctactacaatggctacaggcagtggcgcaccaatggcagacaataacgagggtgccgatggagtgggtaattcttcaggaaattggcattgcgattcccaatggctgggcgacagagtcatcaccaccagcacccgaacctgggcccagcccacctacaacaaccacctctacaagcaaatctcaagccaatcaggagcctcaaacgacaaccactactttggctacagcaccccttgggggtattttgacttcaacagattccactgccacttttcaccacgtgactggcaaagactcatcaacaacaactggggattccgacccaagagactcaacttcaagctctttaacattcaagtcaaagaggtcacgcagaatgacggtacgacgacgattgccaataaccttaccagcacggttcaggtgtttactgactcggagtaccagctcccgtacgtcctcgggtcggcgcatcaaggatgcctcccgccgtttccagcggacgtcttcatggtcccacagtatggatacctcaccctgaacaacgggagtcaggcggtaggacgctcttccttttactgcctggagtactttccttctcagatgcttcgtactggaaacaactttcagttcagctacacctttgaagacgttcctttccacagcagctacgctcacagccagagtctggatcggctgatgaatcctctgatcgaccagtacctgtattatctgaacaaaacacaatcaaatagtggagctcttcagcagtctcggctactgtttagtcaagctggacccaccagcatgtctcttcaagctaaaaactggctacctggaccttgctacagacagcagcgtctgtcaaagcaggcaaacgacaacaacaacagcaactttccctggactgcggctacaaagtaccacctaaatggccgggactcgttggttaatccaggaccagctatggccagtcacaaagacgatgaagaaaagtttttccccatgcatggaaccctgatatttggtaaacaaggaacaaatgctaacgacgcggatttggacaatgtcatgattacagatgaagaagaaatccgcaccaccaatcccgtggctacggagcagtacggatatgtgtcaaataatttgcaaaactcaaatactggtccaactactggaactgtcaatcaccgaggagcgttacctggcatggtgtggcaggatcgagacgtgtacctgcagggacccatttgggccaagattcctcacaccgatggacactttcatccttctccactgatgggaggttttgggctcaaacacccgcctcctcagatcatgatcaaaaacactcccgttccagccaatcctcccacaaacttcagttctgccaagtttgcttctttcatcacacagtattccacggggcaggtcagcgtggagatcgagtgggagctgcagaaagagaacagcaaacgctggaatcccgaaattcagtacacttccaactacaacaaatctgttaatgtggactttactgtggacactaatggcgtgtattcagagcctcgccccattggcaccagatacctgactcgtaatctgtaa

SEQ ID NO: 483 - protein, 735 aa, Artificial Sequence
  source: /note="Description of Artificial Sequence: Synthetic polypeptide"
MAADGYLPDWLEDTLSEGIRQWWKLKPGPPPPKPAERHKDDSRGLVLPGYKYLGPFNGLDKGEPVNEADAAALEHDKAYDRQLDSGDNPYLKYNHADAEFQERLKEDTSFGGNLGRAVFQAKKRVLEPLGLVEEPVKTAPGKKRPVEHSPAEPDSSSGTGKAGQQPARKRLNFGQTGDADSVPDPQPLGQPPAAPSGLGSTTMATGSGAPMADNNEGADGVGNSSGNWHCDSQWLGDRVITTSTRTWAQPTYNNHLYKQISSQSGASNDNHYFGYSTPWGYFDFNRFHCHFSPRDWQRLINNNWGFRPKRLNFKLFNIQVKEVTQNDGTTTIANNLTSTVQVFTDSEYQLPYVLGSAHQGCLPPFPADVFMVPQYGYLTLNNGSQAVGRSSFYCLEYFPSQMLRTGNNFQFSYTFEDVPFHSSYAHSQSLDRLMNPLIDQYLYYLNKTQSNSGALQQSRLLFSQAGPTSMSLQAKNWLPGPCYRQQRLSKQANDNNNSNFPWTAATKYHLNGRDSLVNPGPAMASHKDDEEKFFPMHGTLIFGKQGTNANDADLDNVMITDEEEIRTTNPVATEQYGYVSNNLQNSNTGPTTGTVNHRGALPGMVWQDRDVYLQGPIWAKIPHTDGHFHPSPLMGGFGLKHPPPQIMIKNTPVPANPPTNFSSAKFASFITQYSTGQVSVEIEWELQKENSKRWNPEIQYTSNYNKSVNVDFTVDTNGVYSEPRPIGTRYLTRNL

SEQ ID NO: 484 - DNA, 2217 bp, Artificial Sequence
  source: /note="Description of Artificial Sequence: Synthetic polynucleotide"
atggctgccgatggttatcttccagattggctcgaggacaacctctctgagggcattcgcgagtggtgggcgctgaaacctggagccccgaagcccaaagccaaccagcaaaagcaggacgacggccggggtctggtgcttcctggctacaagtacctcggacccttcaacggactcgacaagggggagcccgtcaacgcggcggacgcagcggccctcgagcacgacaaggcctacgaccagcagctgcaggcgggtgacaatccgtacctgcggtataatcacgccgacgccgagtttcaggagcgtctgcaagaagatacgtcttttgggggcaacctcgggcgagcagtcttccaggccaagaagcgggttctcgaacctctcggtctggttgaggaaggcgctaagacggctcctggaaagaagagaccggtagagccgtcaccacagcgttcccccgactcctccacgggcatcggcaagaaaggccagcagcccgccagaaagagactcaatttcggtcagactggcgactcagagtcagtccccgaccctcaacctatcggagaacctccagcagcgccctctagtgtgggatctggtacaatggctgcaggcggtggcgcgccaatggcagacaataacgaaggtgccgacggagtgggtagttcctcgggaaattggcattgcgattccacatggctgggcgacagagtcatcaccaccagcacccgaacctgggccctgcccacctacaacaaccacctctacaagcaaacctccaacgggacctcgggaggcagcaccaacgacaacacctactttggctacagcaccccctgggggtattttgactttaacagattccactgccacttctcaccacgtgactggcagcgactcatcaacaacaactggggattccggcccaagagactcagcttcaagctcttcaacatccaggtcaaagaggtcacgcagaatgaaggcaccaagaccatcgccaataacctcaccagcaccatccaggtgtttacggactcggaataccagctgccgtacgtcctcggctctgcccaccagggctgcctgcctccgttcccggcggacgtcttcatgattcctcagtacggctacctgactctcaacaacggtagtcaggccgtgggacgttcctccttctactgcctggagtacttcccctctcagatgctgagaacgggcaacaacttttccttcagctacactttcgaggacgtgcctttccacagcagctacgcgcacagccagagtttggacaggctgatgaatcctctcatcgaccagtacctgtactacctgtcaagaacccagtctacgggaggcacagcgggaacccagcagttgctgttttctcaggccgggcctagcaacatgtcggctcaggccagaaactggctgcctggaccctgctacagacagcagcgcgtctccacgacactgtcgcaaaacaacaacagcaactttgcctggactggtgccaccaagtatcatctgaacggcagagactctctggtgaatccgggcgtcgccatggcaaccaacaaggacgacgaggaccgcttcttcccatccagcggcatcctcatgtttggcaagcagggagctggaaaagacaacgtggactatagcaacgtgatgctaaccagcgaggaagaaatcaagaccaccaaccccgtggccacagaacagtatggcgtggtggctgataacctacagcagcaaaacaccgctcctattgtgggggccgtcaacagccagggagccttacctggcatggtctggcagaaccgggacgtgtacctgcagggtcctatttgggccaagattcctcacacagatggcaactttcacccgtctcctttaatgggcggctttggacttaaacatccgcctcctcagatcctcatcaaaaacactcctgttcctgcggatcctccaacagcgttcaaccaggccaagctgaattctttcatcacgcagtacagcaccggacaagtcagcgcggagatcgagtgggagctgcagaaggagaacagcaagcgctggaacccagagattcagtatacttccaactactacaaatctacaaatgtggactttgctgttaatactgagggtgtttactctgagcctcgccccattggcactcgttacctcacccgtaatctgtaa

SEQ ID NO: 485 - protein, 738 aa, Artificial Sequence
  source: /note="Description of Artificial Sequence: Synthetic polypeptide"
MAADGYLPDWLEDNLSEGIREWWALKPGAPKPKANQQKQDDGRGLVLPGYKYLGPFNGLDKGEPVNAADAAALEHDKAYDQQLQAGDNPYLRYNHADAEFQERLQEDTSFGGNLGRAVFQAKKRVLEPLGLVEEGAKTAPGKKRPVEPSPQRSPDSSTGIGKKGQQPARKRLNFGQTGDSESVPDPQPIGEPPAAPSSVGSGTMAAGGGAPMADNNEGADGVGSSSGNWHCDSTWLGDRVITTSTRTWALPTYNNHLYKQTSNGTSGGSTNDNTYFGYSTPWGYFDFNRFHCHFSPRDWQRLINNNWGFRPKRLSFKLFNIQVKEVTQNEGTKTIANNLTSTIQVFTDSEYQLPYVLGSAHQGCLPPFPADVFMIPQYGYLTLNNGSQAVGRSSFYCLEYFPSQMLRTGNNFSFSYTFEDVPFHSSYAHSQSLDRLMNPLIDQYLYYLSRTQSTGGTAGTQQLLFSQAGPSNMSAQARNWLPGPCYRQQRVSTTLSQNNNSNFAWTGATKYHLNGRDSLVNPGVAMATNKDDEDRFFPSSGILMFGKQGAGKDNVDYSNVMLTSEEEIKTTNPVATEQYGVVADNLQQQNTAPIVGAVNSQGALPGMVWQNRDVYLQGPIWAKIPHTDGNFHPSPLMGGFGLKHPPPQILIKNTPVPADPPTAFNQAKLNSFITQYSTGQVSAEIEWELQKENSKRWNPEIQYTSNYYKSTNVDFAVNTEGVYSEPRPIGTRYLTRNL

SEQ ID NO: 486 - DNA, 2217 bp, Artificial Sequence
  source: /note="Description of Artificial Sequence: Synthetic polynucleotide"
atggctgctgacggttatcttccagattggctcgaggacaacctctctgagggcattcgcgagtggtgggacctgaaacctggagcccccaagcccaaggccaaccagcagaagcaggacgacggccggggtctggtgcttcctggctacaagtacctcggacccttcaacggactcgacaagggggagcccgtcaacgcggcggacgcagcggccctcgagcacgacaaggcctacgaccagcagctcaaagcgggtgacaatccgtacctgcggtataatcacgccgacgccgagtttcaggagcgtctgcaagaagatacgtcttttgggggcaacctcgggcgagcagtcttccaggccaagaagcgggttctcgaacctctcggtctggttgaggaagctgctaagacggctcctggaaagaagagaccggtagaaccgtcacctcagcgttcccccgactcctccacgggcatcggcaagaaaggccagcagcccgctagaaagagactgaactttgggcagactggcgactcagagtcagtccccgaccctcaaccaatcggagaacctccagcagcgccctctagtgtgggatctggtacaatggccgcaggcggtggcgcaccaatggcagacaataacgaaggtgccgacggagtgggtagttcctcgggaaattggcattgcgattccacatggctgggcgacagagtcatcaccaccagcacccgaacctgggccctgcccacctacaacaaccacctctacaagcaaatctccaacgggacctcgggaggcagcaccaacgacaacacctactttggctacagcaccccctgggggtattttgactttaacagattccactgccacttctcaccacgtgactggcagcgactcatcaacaacaactggggattccggcccaagagactcagcttcaagctcttcaacatccaggtcaaagaggtcacgcagaatgaaggcaccaagaccatcgccaataacctcaccagcaccatccaggtgtttacggactcggaataccagctgccgtacgtcctcggctctgcccaccagggctgcctgcctccgttcccggcggacgtcttcatgattcctcagtacggctacctgactctcaacaacggtagtcaggccgtgggacgttcctccttctactgcctggagtacttcccctctcagatgctgagaacgggcaacaacttttccttcagctacactttcgaggacgtgcctttccacagcagctacgcgcacagccagagtttggacaggctgatgaatcctctcatcgaccagtacctgtactacctgtcaagaacccagtctacgggaggcacagcgggaacccagcagctgctgttttctcaggccgggcctagcaacatgtcggctcaggccagaaactggctgcctggaccctgctacagacagcagcgcgtctccacgacactgtcgcaaaacaacaacagcaactttgcctggactggtgccaccaagtatcatctgaacggcagagactctctggtgaatccgggcgtcgccatggcaaccaacaaggacgacgaggaccgcttcttcccatccagcggcatcctcatgtttggcaagcagggagctggaaaagacaacgtggactatagcaacgtgatgctaaccagcgaggaagaaatcaagaccaccaaccccgtggccacagaacagtatggcgtggtggctgataacctacagcagcaaaacaccgctcctattgtgggggccgtcaacagccagggagccttacctggcatggtctggcagaaccgggacgtgtacctgcagggtcctatttgggccaagattcctcacacagatggcaactttcacccgtctcctttaatgggcggctttggacttaaacatccgcctcctcagatcctcatcaaaagcactcctgttcctgcggatcctccaacagcgttcaaccaggccaagctgaattctttcatcacgcagtacagcaccggacaagtcagcgtggagatcgagtgggagctgcagaaggagaacagcaagtgctggaacccagagattcagtatacttccaactactacaaatctacaaatgtggactttgctgttaatactgagggtgtttactctgagcctcgccccattggcactcgttacctcacccgtaatctgtaa

SEQ ID NO: 487 - protein, 738 aa, Artificial Sequence
  source: /note="Description of Artificial Sequence: Synthetic polypeptide"
MAADGYLPDWLEDNLSEGIREWWDLKPGAPKPKANQQKQDDGRGLVLPGYKYLGPFNGLDKGEPVNAADAAALEHDKAYDQQLKAGDNPYLRYNHADAEFQERLQEDTSFGGNLGRAVFQAKKRVLEPLGLVEEAAKTAPGKKRPVEPSPQRSPDSSTGIGKKGQQPARKRLNFGQTGDSESVPDPQPIGEPPAAPSSVGSGTMAAGGGAPMADNNEGADGVGSSSGNWHCDSTWLGDRVITTSTRTWALPTYNNHLYKQISNGTSGGSTNDNTYFGYSTPWGYFDFNRFHCHFSPRDWQRLINNNWGFRPKRLSFKLFNIQVKEVTQNEGTKTIANNLTSTIQVFTDSEYQLPYVLGSAHQGCLPPFPADVFMIPQYGYLTLNNGSQAVGRSSFYCLEYFPSQMLRTGNNFSFSYTFEDVPFHSSYAHSQSLDRLMNPLIDQYLYYLSRTQSTGGTAGTQQLLFSQAGPSNMSAQARNWLPGPCYRQQRVSTTLSQNNNSNFAWTGATKYHLNGRDSLVNPGVAMATNKDDEDRFFPSSGILMFGKQGAGKDNVDYSNVMLTSEEEIKTTNPVATEQYGVVADNLQQQNTAPIVGAVNSQGALPGMVWQNRDVYLQGPIWAKIPHTDGNFHPSPLMGGFGLKHPPPQILIKSTPVPADPPTAFNQAKLNSFITQYSTGQVSVEIEWELQKENSKCWNPEIQYTSNYYKSTNVDFAVNTEGVYSEPRPIGTRYLTRNL

SEQ ID NO: 488 - protein, 738 aa, Artificial Sequence
  source: /note="Description of Artificial Sequence: Synthetic polypeptide"
MAADGYLPDWLEDNLSEGIREWWDLKPGAPKPKANQQKQDDGRGLVLPGYKYLGPFNGLDKGEPVNAADAAALEHDKAYDQQLKAGDNPYLRYNHADAEFQERLQEDTSFGGNLGRAVFQAKKRVLEPLGLVEEAAKTAPGKKRPVEPSPQRSPDSSTGIGKKGQQPARKRLNFGQTGDSESVPDPQPIGEPPAAPSSVGSGTMAAGGGAPMADNNEGADGVGSSSGNWHCDSTWLGDRVITTSTRTWALPTYNNHLYKQISNGTSGGSTNDNTYFGYSTPWGYFDFNRFHCHFSPRDWQRLINNNWGFRPKRLSFKLFNIQVKEVTQNEGTKTIANNLTSTIQVFTDSEYQLPYVLGSAHQGCLPPFPADVFMIPQYGYLTLNNGSQAVGRSSFYCLEYFPSQMLRTGNNFSFSYTFEDVPFHSSYAHSQSLDRLMNPLIDQYLYYLSRTQSTGGTAGTQQLLFSQAGPSNMSAQARNWLPGPCYRQQRVSTTLSQNNNSNFAWTGATKYHLNGRDSLVNPGVAMATNKDDEDRFFPSSGILMFGKQGAGKDNVDYSNVMLTSEEEIKTTNPVATEQYGVVADNLQQQNTAPIVGAVNSQGALPGMVWQNRDVYLQGPIWAKIPHTDGNFHPSPLMGGFGLKHPPPQILIKSTPVPADPPTAFNQAKLNSFITQYSTGQVSVEIEWELQKENSKRWNPEIQYTSNYYKSTNVDFAVNTEGVYSEPRPIGTRYLTRNL

SEQ ID NO: 489 - DNA, 2217 bp, Artificial Sequence
  source: /note="Description of Artificial Sequence: Synthetic polynucleotide"
atggctgctgacggttatcttccagattggctcgaggacaacctctctgagggcattcgcgagtggtgggacctgaaacctggagcccccaagcccaaggccaaccagcagaagcaggacgacggccggggtctggtgcttcctggctacaagtacctcggacccttcaacggactcgacaagggggagcccgtcaacgcggcggacgcagcggccctcgagcacgacaaggcctacgaccagcagctcaaagcgggtgacaatccgtacctgcggtataaccacgccgacgccgagtttcaggagcgtctgcaagaagatacgtcttttgggggcaacctcgggcgagcagtcttccaggccaagaagcgggttctcgaacctctcggtctggttgaggaagctgctaagacggctcctggaaagaagagaccggtagaaccgtcacctcagcgttcccccgactcctccacgggcatcggcaagaaaggccagcagcccgctagaaagagactgaactttgggcagactggcgactcagagtcagtccccgaccctcaaccaatcggagaaccaccagcaggcccctctggtctgggatctggtacaatggctgcaggcggtggcgcaccaatggctgacaataacgagggcgccgacggagtgggtaatgcctcaggaaattggcattgcgattccacatggctgggcgacagagtcatcaccaccagcacccgaacctgggctttgcccacctacaacaaccacctctacaagcaaatctccagtcagtcagcaggtagcaccaacgacaacgtctacttcggctacagcaccccctgggggtattttgacttcaacagattccactgtcacttctcaccacgtgactggcagcggctcatcaacaacaactggggattccggcccaagaagctcaacttcaagctgttcaacatccaggtcaaggaggtcacaacgaatgacggcgtcacgaccatcgccaataaccctaccagcacggttcaggtcttttcggactcggaataccagctgccctacgtcctcggctccgcacaccagggctgcctgcctccgttcccggcggacgtcttcatgattccccagtacggctacctgactctgaacaatggcagccaatcggtgggtcgttcctctttctactgcctggaatatttcccttctcaaatgctgagaacgggcaacaacttcaccttcagctacaccttcgaggacgttcccttccacagcagctacgcacacagccagagcctggaccggctgatgaatcctcttatcgaccagtacctgtattacctggccagaacacagagcaacgcaggaggcacagctggcaatcgggaactgcagttttatcagggcgggcctaccaccatggccgaacaagccaaaaactggctgcctggaccctgctacagacagcagcgcgtctccacgacactgtcgcaaaacaacaacagcaactttgcctggactggtgccaccaagtatcatctgaacggcagagactctctggtgaatccgggcgtcgccatggcaaccaacaaggacgacgaggaccgcttcttcccatccagcggcatcctcatgtttggcaagcagggagctggaaaagacaacgtggactatagcaacgtgatgctaaccagcgaggaagaaatcaagaccaccaaccccgtggccacagaacagtatggcgtggtggctgataacctacagcagcaaaacaccgctcctattgtgggggccgtcaacagccagggagccttacctggcatggtctggcagaaccgggacgtgtacctgcagggtcctatttgggccaagattcctcacacagatggcaactttcacccgtctcctttaatgggcggctttggacttaaacatccgcctcctcagatcctcatcaaaaacactcctgttcctgcggatcctccaacagcgttcaaccaggccaagctgaattctttcatcacgcagtacagcaccggacaagtcagcgtggagatcgagtgggagctgcagaaggagaacagcaagcgctggaacccagagattcagtatacttccaactactacaaatctacaaatgtggactttgctgttaatactgagggtgtttactctgagcctcgccccattggcactcgttacctcacccgtaatctgtaa

SEQ ID NO: 490 - protein, 738 aa, Artificial Sequence
  source: /note="Description of Artificial Sequence: Synthetic polypeptide"
MAADGYLPDWLEDNLSEGIREWWDLKPGAPKPKANQQKQDDGRGLVLPGYKYLGPFNGLDKGEPVNAADAAALEHDKAYDQQLKAGDNPYLRYNHADAEFQERLQEDTSFGGNLGRAVFQAKKRVLEPLGLVEEAAKTAPGKKRPVEPSPQRSPDSSTGIGKKGQQPARKRLNFGQTGDSESVPDPQPIGEPPAGPSGLGSGTMAAGGGAPMADNNEGADGVGNASGNWHCDSTWLGDRVITTSTRTWALPTYNNHLYKQISSQSAGSTNDNVYFGYSTPWGYFDFNRFHCHFSPRDWQRLINNNWGFRPKKLNFKLFNIQVKEVTTNDGVTTIANNPTSTVQVFSDSEYQLPYVLGSAHQGCLPPFPADVFMIPQYGYLTLNNGSQSVGRSSFYCLEYFPSQMLRTGNNFTFSYTFEDVPFHSSYAHSQSLDRLMNPLIDQYLYYLARTQSNAGGTAGNRELQFYQGGPTTMAEQAKNWLPGPCYRQQRVSTTLSQNNNSNFAWTGATKYHLNGRDSLVNPGVAMATNKDDEDRFFPSSGILMFGKQGAGKDNVDYSNVMLTSEEEIKTTNPVATEQYGVVADNLQQQNTAPIVGAVNSQGALPGMVWQNRDVYLQGPIWAKIPHTDGNFHPSPLMGGFGLKHPPPQILIKNTPVPADPPTAFNQAKLNSFITQYSTGQVSVEIEWELQKENSKRWNPEIQYTSNYYKSTNVDFAVNTEGVYSEPRPIGTRYLTRNL

SEQ ID NO: 491 - DNA, 2208 bp, Artificial Sequence
  source: /note="Description of Artificial Sequence: Synthetic polynucleotide"
atggctgccgatggttatcttccagattggctcgaggacaacctctctgagggcattcacgagtggtgggacccgaaacctggagccccgaaacccaaagccaaccagcaaaagcaggacgacggccggggtctggtgcttcctggctacaagtacctcggacccttcaacggactcgacaagggggagcccgtcaacgcggcggacgcagcggccctcgagcacgacaaggcctacgaccagcagctcaaagcgggtgacaatccgtacctgcggtataatcacgccgacgccgagtttcaggagcgtctgcaagaagatacgtcttttgggggcaacctcgggcgagcagtcttccaggccaagaagcgggttctcgaacctctcggtctggttgaggaaggcgctaagacggctcctggaaagaagagaccggtagagccgtcaccacagcgttcccccgactcctccacgggcatcggcaagaaaggccagcagcccgccagaaagagactcaatttcggtcagactggcgactcagagtcagtccccgaccctcaacctatcggagaacctccagcagcgccctctagtgtgggatctggtacaatggctgcaggcggtggcgcaccaatggcagacaataacgaaggtgccgacggagtgggtagttcctcgggaaattggcattgcgattccacatggctgggcgacagagtcatcaccaccagcacccgaacctgggccctgcccacccacaacaaccacctctacaagcaaatctccaacgggacctcgggaggcagcaccaacgacaacgtctacttcggctacagcaccccctgggggtattttgacttcaacagattccactgtcacttctcaccacgtgaccggcagcgactcatcaacaacaactggggattccggcccaagagactcagcttcaagctcttcaacatccaggtcaaagaggtcacgcagaatgaaggcaccaagaccatcgccaataacctcaccagcaccatccaggtgtttacggactcggaataccagctgccgtacgtcctcggctctgcccaccagggctgcctgcctccgttcccggcggacgtcttcatgattcctcagtacggctacctgactctcaacaacggtagtcaggccgtgggacgttcctccttctactgcctggagtacttcccctctcagatgctgagaacgggcaacaacttttccttcagctacactttcgaggacgtgcctttccacagcagctacgcgcacagccagagtttggacaggctgatgaatcctctcatcgaccagtacctgtactacctgtcaagaacccagtctacggaaggcacagcgggaacccagcagttgctgttttctcaggccgggcctagcaacatgtcggctcaggccagaaactggctgcctggaccctgctacagacagcagcgcgtctccacgacactgtcgcaaaacaacaacagcaactttgcctggactggtgccaccaagtatcatctgaacggcagagactctctggtgaatccgggcgtcgccatggcaacccacaaggacgacgaggaacgcttcttcccttcgagcggagtcctgatttttggaaaaactggagcagctaataagactacactggaaaatgtgttaatgacaaatgaagaggaaattcgtcctaccaacccggtagccaccgaggaatacgggactgttagcagcaacctgcaggcggctaacactgcagcccagacacaagttgtcaacaaccagggagccttacctggtatggtctggcagaaccgggacgtgtacctgcagggtcccatctgggccaagattcctcacacggacggcaactttcacccgtctccgctgatgggcggctttggactgaagcatcctcagatcctgatcaaaaacactcctgttcctgctaatcccccggaggtgtttacgcctgccaagtttgcttctttcatcacacagtacagcaccggccaggtcagcgtggagatcgagtgggagctgcagaaggagaacagcaagcgctggaacccagagattcagtatacctccaattttgacaaacagactggtgtggactttgccgttgacagccagggtgtttattctgagcctcgccccattggtactcgttacctcacccgtaatctgtaa

SEQ ID NO: 492 - protein, 735 aa, Artificial Sequence
  source: /note="Description of Artificial Sequence: Synthetic polypeptide"
MAADGYLPDWLEDNLSEGIHEWWDPKPGAPKPKANQQKQDDGRGLVLPGYKYLGPFNGLDKGEPVNAADAAALEHDKAYDQQLKAGDNPYLRYNHADAEFQERLQEDTSFGGNLGRAVFQAKKRVLEPLGLVEEGAKTAPGKKRPVEPSPQRSPDSSTGIGKKGQQPARKRLNFGQTGDSESVPDPQPIGEPPAAPSSVGSGTMAAGGGAPMADNNEGADGVGSSSGNWHCDSTWLGDRVITTSTRTWALPTHNNHLYKQISNGTSGGSTNDNVYFGYSTPWGYFDFNRFHCHFSPRDRQRLINNNWGFRPKRLSFKLFNIQVKEVTQNEGTKTIANNLTSTIQVFTDSEYQLPYVLGSAHQGCLPPFPADVFMIPQYGYLTLNNGSQAVGRSSFYCLEYFPSQMLRTGNNFSFSYTFEDVPFHSSYAHSQSLDRLMNPLIDQYLYYLSRTQSTEGTAGTQQLLFSQAGPSNMSAQARNWLPGPCYRQQRVSTTLSQNNNSNFAWTGATKYHLNGRDSLVNPGVAMATHKDDEERFFPSSGVLIFGKTGAANKTTLENVLMTNEEEIRPTNPVATEEYGTVSSNLQAANTAAQTQVVNNQGALPGMVWQNRDVYLQGPIWAKIPHTDGNFHPSPLMGGFGLKHPQILIKNTPVPANPPEVFTPAKFASFITQYSTGQVSVEIEWELQKENSKRWNPEIQYTSNFDKQTGVDFAVDSQGVYSEPRPIGTRYLTRNL

SEQ ID NO: 493 - protein, 738 aa, Artificial Sequence
  source: /note="Description of Artificial Sequence: Synthetic polypeptide"
MAADGYLPDWLEDNLSEGIREWWDLKPGAPKPKANQQKQDDGRGLVLPGYKYLGPFNGLDKGEPVNAADAAALEHDKAYDQQLKAGDNPYLRYNHADAEFQERLQEDTSFGGNLGRAVFQAKKRVLEPLGLVEEGAKTAPGKKRPVEPSPQRSPDSSTGIGKKGQQPARKRLNFGQTGDSESVPDPQPIGEPPAAPSSVGSGTMAAGGGAPMADNNEGADGVGSSSGNWHCDSTWLGDRVITTSTRTWALPTYNNHLYKQISNGTSGGSTNDNTYFGYSTPWGYFDFNRFHCHFSPRDWQRPINNNWGFRPKRLSFKLFNIQVKEVTQNEGTKTIANNLTSTIQVFTDSEYQLPYVLGSAHQGCLPPFPADVFMIPQYGYLTLNNGSQAVGRSSFYCLEYFPSQMLRTGNNFSFSYPFEDVPFHSSYAHSQSLDRLMNPLIDQYLYYLSRTQSTGGTAGTQQLLFSQAGPSNMSAQARNWLPGPCYRQQRVSTTLSQNNNSNFAWTGATKYHLNGRDSLVNPGVAMATNKDDEDRFFPSSGILMFGKQGAGKDNVDYSNVMLTSEEEIKTTNPVATEQYGVVADNLQQQDTAPIVGAVNSQGALPGMVWQNRDVYLQGPIWAKIPHTDGNFHPSPLMGGFGLKHPPPQVLIKNTPVPADPPTAFNQAKLNSFITQYSTGQVSVEIEWELQKENSKRWNPEIQYTSNYYKSTNVDFAVNTEGVYSEPRPIGTRYLTRNL

SEQ ID NO: 494 - DNA, 2217 bp, Artificial Sequence
  source: /note="Description of Artificial Sequence: Synthetic polynucleotide"
atggctgccgatggttatcttccagattggctcgaggacaacctctctgagggcattcgcgagtggtgggacctgaaacctggagccccgaaacccaaggccaaccagcaaaagcaggacgacggccggggtctggtgcttcctggctacaagtacctcggacccttcaacggactcgacaagggggagcccgtcaacgcggcggacgcagcggccctcgagcacgacaaggcctacgaccagcagctcaaagcgggtgacaatccgtacctgcggtataatcacgccgacgccgagtttcaggagcgtctgcaagaagatacgtcttttgggggcaacctcgggcgagcagtcttccaggccaagaagcgggttctcgaacctctcggtctggttgaggaaggcgctaagacggctcctggaaagaagagaccggtagagccgtcaccacagcgttcccccgactcctccacgggcatcggcaagaaaggccagcagcccgccagaaagagactcaatttcggtcagactggcgactcagagtcagtccccgaccctcaacctatcggagaacctccagcagcgccctctagtgtgggatctggtacaatggctgcaggcggtggcgcaccaatggcagacaataacgaaggtgccgacggagtgggtagttcctcgggaaattggcattgcgattccacatggctgggcgacagagtcatcaccaccagcacccgaacctgggccctgcccacctacaacaaccacctctacaagcaaatctccaacgggacctcgggaggcagcaccaacgacaacacctactttggctacagcaccccctgggggtattttgactttaacagattccactgccacttctcaccacgtgactggcagcgacccatcaacaacaactggggattccggcccaagagactcagcttcaagctcttcaacatccaggtcaaagaggtcacgcagaatgaaggcaccaagaccatcgccaataacctcaccagcaccatccaggtgtttacggactcggaataccagctgccgtacgtcctcggctctgcccaccagggctgcctgcctccgttcccggcggacgtcttcatgattcctcagtacggctacctgactctcaacaacggtagtcaggccgtgggacgttcctccttctactgcctggagtacttcccctctcagatgctgagaacgggcaacaacttttccttcagctaccctttcgaggacgtgcctttccacagcagctacgcgcacagccagagtttggacaggctgatgaatcctctcatcgaccagtacctgtactacctgtcaagaacccagtctacgggaggcacagcgggaacccagcagttgctgttttctcaggccgggcctagcaacatgtcggctcaggccagaaactggctgcctggaccctgctacagacagcagcgcgtctccacgacactgtcgcaaaacaacaacagcaactttgcctggactggtgccaccaagtatcatctgaacggcagagactctctggtgaatccgggcgtcgccatggcaaccaacaaggacgacgaggaccgcttcttcccatccagcggcatcctcatgtttggcaagcagggagctggaaaagacaacgtggactatagcaacgtgatgctaaccagcgaggaagaaatcaagaccaccaaccccgtggccacagaacagtatggcgtggtggctgataacctacagcagcaagacaccgctcctattgtgggggccgtcaacagccagggagccttacctggcatggtctggcagaaccgggacgtgtacctgcagggtcctatttgggccaagattcctcacacagatggcaactttcacccgtctcctttaatgggcggctttggacttaaacatccgcctcctcaggtcctcatcaaaaacactcctgttcctgcggatcctccaacagcgttcaaccaggccaagctgaattctttcatcacgcagtacagcaccggacaagtcagcgtggagatcgagtgggagctgcagaaggagaacagcaagcgctggaacccagagattcagtatacttccaactactacaaatctacaaatgtggactttgctgttaatactgagggtgtttactctgagcctcgccccattggcactcgttacctcacccgtaatctgtaa

SEQ ID NO: 495 - DNA, 2214 bp, Artificial Sequence
  source: /note="Description of Artificial Sequence: Synthetic polynucleotide"
atggctgctgacggttatcttccagattggctcgaggacaacctctctgagggcattcgcgagtggtgggacctgaaacctggagcccccaagcccaaggccaaccagcagaagcaggacgacggccggggtctggtgcttcctggctacaagtacctcggacccttcaacggactcgacaagggggagcccgtcaacgcggcggacgcagcggccctcgagcacgacaaggcctacgaccagcagctcaaagcgggtgacaatccgtacctgcggtataaccacgccgacgccgagttccaggagcgtctgcaagaagatacgtcttttgggggcaacctcgggcgagcagtcttccaggccaagaagcgggttctcgaacctctcggtctggctgaggaagctgctaagacggctcctggaaagaagagaccggtagaaccgtcacctcagcgttcccccgactcctccacgggcatcggcaagaaaggccagcagcccgctagaaagagactgaactttgggcagactggcgactcagagtcagtccccgaccctcaaccaatcggagagccaccagcaggcccctctggtctgggatctggtacaatggctgcaggcggtggcgcaccaatggctgacaataacaagggcgccgacggagtgggtaatgcctcaggaaattggcattgcgattccacatggctgggcgacagagtcatcaccaccagcacccgaacctgggctttgcccacctacaacaaccacctctacaagcaaatctccagtcagtcagcaggtagcaccaacgacaacgtctacttcggctacagcaccccctgggggtattttgacttcaacagattccactgtcacttctcaccacgtgactggcagcggctcatcaacaacaactggggattccggcccaagaagctcaacttcaagctgttcaacatccaggtcaaggaggtcacaacgggtgacggcgtcacgaccatcgccaataaccttaccagcacggttcaggtcttttcggactcggaataccagctgccctacgtcctcggctccgcacaccagggctgcctgcctccgttcccggcggacgtcttcatgattccccagtacggctacctgactctgaacaatgacagccaatcggtgggtcgttcctctttctactgcctggaatatttcccttctcaaatgctgagaacgggcaacaacttcaccttcagctacaccttcgaggacgttcccttccacagcagctacgcacacagccagagcctggaccggctgatgaatcctcttatcgaccagtacctgtattacctggccagaacacagagcaacgcaggaggcacagctggcaatcgggaactgcagttttatcagggcgggcctaccaccatggccgaacaagccaaaaactggctgcctggaccttgcttccggcaacaaagagtctccaagacgctggatcaaaacaacaacagcaactttgcttggactggtgccaccaaataccatctaaatggaagaaattcattggttaatcccggtgtcgccatggcaacccacaaggacgacgaggaacgcttcttcccttcgagcggagtcctgatttttggaaaaactggagcagctaataagactacactggaaaatgtgttaatgacaaatgaagaggaaattcgtcctaccaacccggtagccaccgaggaatacgggactgttagcagcaacctgcaggcggctaacactgcagcccagacacaagttgtcaacaaccagggagccttacctggtatggtctggcagaaccgggacgtgtacctgcagggtcccatctgggccaagattcctcacacggacggcaactttcacccgtctccgctgatgggcggctttggactgaagcatccgcctcctcagatcctgatcaaaaacactcctgttcctgctaatcccccggaggtgtttacgcctgccaagtttgcttctttcatcacacagtacagcaccggccaggtcagcgtggagatcgagtgggagctgcagaaggagaacagcaagcgctggaacccagagattcagtatacctccaattttgacaaacagactggtgtggactttgccgttgacagccagggtgtttattctgagcctcgccccattggtactcgttacctcacccgtaatctgtaa

SEQ ID NO: 496 - protein, 737 aa, Artificial Sequence
  source: /note="Description of Artificial Sequence: Synthetic polypeptide"
MAADGYLPDWLEDNLSEGIREWWDLKPGAPKPKANQQKQDDGRGLVLPGYKYLGPFNGLDKGEPVNAADAAALEHDKAYDQQLKAGDNPYLRYNHADAEFQERLQEDTSFGGNLGRAVFQAKKRVLEPLGLAEEAAKTAPGKKRPVEPSPQRSPDSSTGIGKKGQQPARKRLNFGQTGDSESVPDPQPIGEPPAGPSGLGSGTMAAGGGAPMADNNKGADGVGNASGNWHCDSTWLGDRVITTSTRTWALPTYNNHLYKQISSQSAGSTNDNVYFGYSTPWGYFDFNRFHCHFSPRDWQRLINNNWGFRPKKLNFKLFNIQVKEVTTGDGVTTIANNLTSTVQVFSDSEYQLPYVLGSAHQGCLPPFPADVFMIPQYGYLTLNNDSQSVGRSSFYCLEYFPSQMLRTGNNFTFSYTFEDVPFHSSYAHSQSLDRLMNPLIDQYLYYLARTQSNAGGTAGNRELQFYQGGPTTMAEQAKNWLPGPCFRQQRVSKTLDQNNNSNFAWTGATKYHLNGRNSLVNPGVAMATHKDDEERFFPSSGVLIFGKTGAANKTTLENVLMTNEEEIRPTNPVATEEYGTVSSNLQAANTAAQTQVVNNQGALPGMVWQNRDVYLQGPIWAKIPHTDGNFHPSPLMGGFGLKHPPPQILIKNTPVPANPPEVFTPAKFASFITQYSTGQVSVEIEWELQKENSKRWNPEIQYTSNFDKQTGVDFAVDSQGVYSEPRPIGTRYLTRNL

SEQ ID NO: 497 - DNA, 2217 bp, Artificial Sequence
  source: /note="Description of Artificial Sequence: Synthetic polynucleotide"
atggctgccgatggttatcttccagattggctcgaggacaacctctctgagggcattcgcgagtggtgggacctgaaacctggagccccgaaacccaaagccaaccagcaaaagcaggacgacggccggggtctggtgcttcctggctacaagtacctcggacccttcaacggactcgacaagggggagcccgtcaacgcggcggacgcagcggccctcgagcacgacaaggcctacgaccagcagctcaaagcgggtgacaatccgtacctgcggtataatcacgccgacgccgagtttcaggagcgtctgcaagaagatacgtcttttgggggcaacctcgggcgagcagtcttccaggccaagaagcgggttctcgaacctctcggtctggttgaggaaggcgctaagacggctcctggaaagaagagaccggtagagccgtcaccacagcgttcccccgactcctccacgggcatcggcaagaaaggccagcagcccgccagaaagagactcaatttcggtcagactggcgactcagagtcagtccccgaccctcaacctatcggagaacctccagcagcgccctctagtgtgggatctggtacaatggctgcaggcggtggcgcaccaatggcagacaataacgaaggtgccgacggagtgggtagttcctcgggaaattggcattgcgattccacatggctgggcgacagagtcatcaccaccagcacccgaacctgggccctgcccacctacaacaaccacctctacaagcaaatctccaacgggacctcgggaggcagcaccaacgacaacacctactttggctacagcaccccctgggggtattttgactttaacagattccactgccacttctcaccacgtgactggcagcgactcatcaacaacaactggggattccggcccaagagactcagcttcaagctcttcaacatccaggtcaaagaggtcacgcagaatgaaggcaccaagaccatcgccaataacctcaccagcaccatccaggtgtttacggactcggaataccagctgccgtacgtcctcggctctgcccaccagggctgcctgcctccgttcccggcggacgtcttcatgattcctcagtacggctacctgactctcaacaacggtagtcaggccgtgggacgttcctccttctactgcctggagtacttcccctctcagatgctgagaacgggcaacaacttttccttcagctacactttcgaggacgtgcctttccacagcagctacgcgcacagccagagtttggacaggctgatgaatcctctcatcgaccagtacctgtactacctgtcaagaacccagtctacgggaggcacagcgggaacccagcagttgctgttttctcaggccgggcctagcaacatgtcggctcaggccagaaactggctgcctggaccctgctacagacagcagcgcgtctccacgacactgtcgcaaaacaacaacagcaactttgcctggactggtgccaccaagtatcatctgaacggcagagactctctggtgaatccgggcgtcgccatggcaaccaacaaggacgacgaggaccgcttcttcccatccagcggcatcctcatgtttggcaagcagggagctggaaaagacaacgtggactatagcaacgtgatgctaaccagcgaggaagaaatcaagaccaccaaccccgtggccacagaacagtatggcgtggtggctgataacctacagcagcaaaacaccgctcctattgtgggggccgtcaacagccagggagccttacctggcatggtctggcagaaccgggacgtgtacctgcagggtcctatttgggccaagattcctcacacagatggcaactttcacccgtctcctttaatgggcggctttggacttaaacatccgcctcctcagatcctcatcaaaaacactcctgttcctgcggatcctccaacagcgttcaaccaggccaagctgaattctttcatcacgcagtacagcaccggacaagtcagcgtggagatcgtgtgggagctgcagaaggagaacagcaagcgcaggaacccagagattcagtatacttccaactactacaaatctacaaatgtggactttgctgttaatactgagggtgtttactctgagcctcgccccattggcactcgttacctcacccgtaatctgtaa

SEQ ID NO: 498 - protein, 738 aa, Artificial Sequence
  source: /note="Description of Artificial Sequence: Synthetic polypeptide"
MAADGYLPDWLEDNLSEGIREWWDLKPGAPKPKANQQKQDDGRGLVLPGYKYLGPFNGLDKGEPVNAADAAALEHDKAYDQQLKAGDNPYLRYNHADAEFQERLQEDTSFGGNLGRAVFQAKKRVLEPLGLVEEGAKTAPGKKRPVEPSPQRSPDSSTGIGKKGQQPARKRLNFGQTGDSESVPDPQPIGEPPAAPSSVGSGTMAAGGGAPMADNNEGADGVGSSSGNWHCDSTWLGDRVITTSTRTWALPTYNNHLYKQISNGTSGGSTNDNTYFGYSTPWGYFDFNRFHCHFSPRDWQRLINNNWGFRPKRLSFKLFNIQVKEVTQNEGTKTIANNLTSTIQVFTDSEYQLPYVLGSAHQGCLPPFPADVFMIPQYGYLTLNNGSQAVGRSSFYCLEYFPSQMLRTGNNFSFSYTFEDVPFHSSYAHSQSLDRLMNPLIDQYLYYLSRTQSTGGTAGTQQLLFSQAGPSNMSAQARNWLPGPCYRQQRVSTTLSQNNNSNFAWTGATKYHLNGRDSLVNPGVAMATNKDDEDRFFPSSGILMFGKQGAGKDNVDYSNVMLTSEEEIKTTNPVATEQYGVVADNLQQQNTAPIVGAVNSQGALPGMVWQNRDVYLQGPIWAKIPHTDGNFHPSPLMGGFGLKHPPPQILIKNTPVPADPPTAFNQAKLNSFITQYSTGQVSVEIVWELQKENSKRRNPEIQYTSNYYKSTNVDFAVNTEGVYSEPRPIGTRYLTRNL

SEQ ID NO: 499 - protein, 738 aa, Artificial Sequence
  source: /note="Description of Artificial Sequence: Synthetic polypeptide"
MAADGYLPDWLEDNLSEGIREWWDLKPGAPKPKANQQKQDDGRGLVLPGYKYLGPFNGLDKGEPVNAADAAALEHDKAYDQQLKAGDNPYLRYNHADAEFQERLQEDTSFGGNLGRAVFQAKKRVLEPLGLVEEGAKTAPGKKRPVEPSPQRSPDSSTGIGKKGQQPARKRLNFGQTGDSESVPDPQPIGEPPAAPSSVGSGTMAAGGGAPMADNNEGADGVGSSSGNWHCDSTWLGDRVITTSTRTWALPTYNNHLYKQISNGTSGGSTNDNTYFGYSTPWGYFDFNRFHCHFSPRDWQRLINNNWGFRPKRLSFKLFNIQVKEVTQNEGTKTIANNLTSTIQVFTDSEYQLPYVLGSAHQGCLPPFPADVFMIPQYGYLTLNNGSQAVGRSSFYCLEYFPSQMLRTGNNFSFSYTFEDVPFHSSYAHSQSLDRLMNPLIDQYLYYLSRTQSTGGTAGTQQLLFSQAGPSNMSAQARNWLPGPCYRQQRVSTTLSQNNNSNFAWTGATKYHLNGRDSLVNPGVAMATNKDDEDRFFPSSGILMFGKQGAGKDNVDYSNVMLTSEEEIKTTNPVATEQYGVVADNLQQQNTAPIVGAVNSQGALPGMVWQNRDVYLQGPIWAKIPHTDGNFHPSPLMGGFGLKHPPPQILIKNTPVPADPPTAFNQAKLNSFITQYSTGQVSVEIEWELQKENSKRWNPEIQYTSNYYKSTNVDFAVNTEGVYSEPRPIGTRYLTRNL

SEQ ID NO: 500 - protein, 738 aa, Artificial Sequence
  source: /note="Description of Artificial Sequence: Synthetic polypeptide"
MAADGYLPDWLEDNLSEGIREWWDLKPGAPKPKANQQKQDDGRGLVLPGYKYLGPFNGLDKGEPVNAADAAALEHDKAYDQQLKAGDNPYLRYNHADAEFQERLQEDTSFGGNLGRAVFQAKKRVLEPLGLVEEGAKTAPGKKRPVEPSPQRSPDSSTGIGKKGQQPARKRLNFGQTGDSESVPDPQPIGEPPAAPSSVGSGTMAAGGGAPMADNNEGADGVGSSSGNWHCDSTWLGDRVITTSTRTWALPTYNNHLYKQISNGTSGGSTNDNTYFGYSTPWGYFDFNRFHCHFSPRDWQRLINNNWGFRPKRLSFKLFNIQVKEVTQNEGTKTIANNLTSTIQVFTDSEYQLPYVLGSAHQGCLPPFPADVFMIPQYGYLTLNNGSQAVGRSSFYCLEYFPSQMLRTGNNFSFSYTFEDVPFHSSYAHSQSLDRLMNPLIDQYLYYLSRTQSTGGTAGTQQLLFSQAGPSNMSAQARNWLPGPCYRQQRVSTTLSQNNNSNFAWTGATKYHLNGRDSLVNPGVAMATNKDDEDRFFPSSGILMFGKQGAGKDNVDYSNVMLTSEEEIKTTNPVATEQYGVVADNLQQQNTAPIVGAVNSQGALPGMVWQNRDVYLQGPIWAKIPHTDGNFHPSPLMGGFGLKHPPPQILIKNTPVPADPPTAFNQAKLNSFITQYSTGQVSVEIVWELQKENSKRWNPEIQYTSNYYKSTNVDFAVNTEGVYSEPRPIGTRYLTRNL

SEQ ID NO: 501 - protein, 738 aa, Artificial Sequence; identical to SEQ ID NO: 499
  source: /note="Description of Artificial Sequence: Synthetic polypeptide"

SEQ ID NO: 502 - DNA, 2214 bp, Artificial Sequence
  source: /note="Description of Artificial Sequence: Synthetic polynucleotide"
atggctgctgacggttatcttccagattggctcgaggacaacctctctgagggcattcgcgagtggtgggacctgaaacctggagcccccaagcccaaggccaaccagcagaagcaggacgacggccggggtctggtgcttcctggctacaagtacctcggacccttcaacggactcgacaagggggagcccgtcaacgcggcggacgcagcggccctcgagcacgacaaggcctacgaccagcagctcaaagcgggtgacaatccgtacctgcggtataaccacgccgacgccgagtttcaggagcgtctgcaagaagatacgtcttttgggggcaacctcgggcgagcagtcttccaggccaagaagcgggttctcgaacctctcggtctggttgaggaagctgctaagacggctcctggaaagaagagaccggtagaaccgtcacctcagcgttcccccgactcctccacgggcatcggcaagaaaggccagcagcccgctagaaagagactgaactttgggcagactggcgactcagagtcagtccccgaccctcaaccaatcggagaaccaccagcaggcccctctggtctgggatctggtacaatggctgcaggcggtggcgctccaatggcagacaataacgaaggcgccgacggagtgggtaatgcctcaggaaattggcattgcgattccacatggctgggcgacagagtcatcaccaccagcacccgaacctgggctttgcccacctacaacaaccacctctacaagcaaatctccagtcagtcagcaggtagcaccaacgacaacgtctacttcggctacagcaccccctgggggtattttgacttcaacagattccactgtcacttctcaccacgtgactggcagcggctcatcaacaacaactggggattccggcccaagaagctcaacttcaagctgttcaacatccaggtcaaggaggtcacaacgaatgacggcgtcacgaccatcgccaataaccttaccagcacggttcaggtcttttcggactcggaataccagctgccctacgtcctcggctccgcacaccagggctgcctgcctccgttcccggcggacgtcttcatgattccccagtacggctacctgactctgaacaatggcagccaatcggtgggtcgttcctctttctactgcctggaatatttcccttctcaaatgctgagaacgggcaacaacttcaccttcagctacaccttcgaggacgttcccttccacagcagctacgcacacagccagagcctggaccggctgatgaatcctcttatcgaccagtacctgtattacctggccagaacacagagcaacgcaggaggcacagctggcaatcgggaactgcagttttatcagggcgggcctaccaccatggccgaacaagccaaaaactggctgcctagaccttgcttccggcaacaaagagtctccaagacgctggatcaaaacaacaacagcaactttgcttggactggtgccaccaaataccatctaaatggaagaaattcattggttaatcccggtgtcgccatggcaacccacaaggacgacgaggaacgcttcttcccttcgagcggagtcctgatttttggaaaaactggagcagctaataagactacactggaaaatgtgttaatgacaaatgaagaggaaattcgtcctaccaacccggtagccaccgaggaatacgggactgttagcagcaacctgcaggcggctaacactgcagcccagacacaagttgtcaacaaccagggagccttacctggtatggtctggcagaaccgggacgtgtacctgcagggtcccatctgggccaagattcctcacacggacggcaactttcacccgtctccgctgatgggcggctttggactgaagcatccgcctcctcagatcctgatcaaaaacactcctgttcctgctaatcccccggaggtgtttacgcctgccaagtttgcttctttcatcacacagtacagcaccggccaggtcagcgtggagatcgagtgggagctgcagaaggagaacagcaagcgctggaacccagagattcagtatacctccaattttgacaaacagactggtgtggactttgccgttgacagccagggtgtttattctgagcctcgccccattggtactcgttacctcacccgtaatctgtaa

SEQ ID NO: 503 - protein, 737 aa, Artificial Sequence
  source: /note="Description of Artificial Sequence: Synthetic polypeptide"
MAADGYLPDWLEDNLSEGIREWWDLKPGAPKPKANQQKQDDGRGLVLPGYKYLGPFNGLDKGEPVNAADAAALEHDKAYDQQLKAGDNPYLRYNHADAEFQERLQEDTSFGGNLGRAVFQAKKRVLEPLGLVEEAAKTAPGKKRPVEPSPQRSPDSSTGIGKKGQQPARKRLNFGQTGDSESVPDPQPIGEPPAGPSGLGSGTMAAGGGAPMADNNEGADGVGNASGNWHCDSTWLGDRVITTSTRTWALPTYNNHLYKQISSQSAGSTNDNVYFGYSTPWGYFDFNRFHCHFSPRDWQRLINNNWGFRPKKLNFKLFNIQVKEVTTNDGVTTIANNLTSTVQVFSDSEYQLPYVLGSAHQGCLPPFPADVFMIPQYGYLTLNNGSQSVGRSSFYCLEYFPSQMLRTGNNFTFSYTFEDVPFHSSYAHSQSLDRLMNPLIDQYLYYLARTQSNAGGTAGNRELQFYQGGPTTMAEQAKNWLPRPCFRQQRVSKTLDQNNNSNFAWTGATKYHLNGRNSLVNPGVAMATHKDDEERFFPSSGVLIFGKTGAANKTTLENVLMTNEEEIRPTNPVATEEYGTVSSNLQAANTAAQTQVVNNQGALPGMVWQNRDVYLQGPIWAKIPHTDGNFHPSPLMGGFGLKHPPPQILIKNTPVPANPPEVFTPAKFASFITQYSTGQVSVEIEWELQKENSKRWNPEIQYTSNFDKQTGVDFAVDSQGVYSEPRPIGTRYLTRNL

SEQ ID NO: 504 - DNA, 2214 bp, Artificial Sequence
  source: /note="Description of Artificial Sequence: Synthetic polynucleotide"
atggctgctgacggttatcttccagattggctcgaggacaacctctctgagggcattcgcgagtggtgggacctgaaacctggagcccccaagcccaaggccaaccagcagaagcaggacgacggccggggtctggtgcttcctggctacaagtacctcggacccttcaacggactcgacaagggggagcccgtcaacgcggcggacgcagcggccctcgagcacgacaaggcctacgaccagcagctcaaagcgggtgacaatccgtacctgcggtataaccatgccgacgccgagtttcaggagcgtctgcaagaagatacgtcttttgggggcaacctcgggcgagcagtcctccaggccaagaagcgggttctcgaacctctcggtctggttgaggaagctgctaagacggctcctggaaagaagagaccggtagaaccgtcacctcagcgttcccccgactcctccacgggcatcggcaagaaaggccagcagcccgctagaaagagactgaactttgggcagactggcgactcagagtcagtccccgaccctcaaccaatcggagaaccaccagcaggcccctctggtctgggatctggtacaatggctgcaggcggtggcgctccaatggcagacaataacgaaggcgccgacggagtgggtaatgcctcaggaaattggcattgcgattccacatggctgggcgacagagtcatcaccaccagcacccgaacctgggctttgcccacctacaacaaccacctctacaagcaaatctccagtcagtcagcaggtagcaccaacgacaacgtctacttcggctacagcaccccctgggggtattttgacttcaacagattccactgtcacttctcaccacgtgactggcagcggctcatcaacaacaactggggattccggcccaagaagctcaacttcaagctgttcaacatccaggtcaaggaggtcacaacgaatgacggcgtcacgaccatcgccaataaccttaccagcacggttcaggtcttttcggactcggaataccagctgccctacgtcctcggctccgcacaccagggctgcctgcctccgttcccggcggacgtcttcatgattccccagtacggctacctgactctgaacaatggcagccaatcggtgggtcgttcctctttctactgcctggaatatttcccttctcaaatgctgagaacgggcaacaacttcaccttcagctacaccttcgaggacgttcccttccacagcagctacgcacacagccagagcctggaccggctgatgaatcctcttatcgaccagtacctgtattacctggccagaacacagagcaacgcaggaggcacagctggcaatcgggaactgcagttttatcagggcgggcctaccaccatggccgaacaagccaaaaactggctgcctggaccttgcttccggcaacaaagagtctccaagacgctggatcaaaacaacaacagcaactttgcttggactggtgccaccaaataccatctaaatggaagaaattcattggttaatcccggtgtcgccatggcaacccacaaggacgacgaggaacgcttcttcccttcgagcggagtcctgatttttggaaaaactggagcagctaataagactacactggaaaatgtgttaatgacaaatgaagaggaaattcgtcctaccaacccggtagccaccgaggaatacgggactgttagcagcaacctgcaggcggctaacactgcagcccagacacaagttgtcaacaaccagggagccttacctggtatggtctggcagaaccgggacgtgtacctgcagggtcccatctgggccaagattcctcacacggacggcaactttcacccgtctccgctgatgggcggctttggactgaagcatccgcctcctcagatcctgatcaaaaacactcctgttcctgctaatcccccggaggtgtttacgcctgccaagtttgcttctttcatcacacagtacagcaccggccaggtcagcgtggagatcgagtgggagctgcagaaggagaacagcaagcgctggaacccagagattcagtatacctccaattttgacaaacagactggtgtggactttgccgttgacagccagggtgtttattctgagcctcgccccattggtactcgttacctcacccgtaatctgtaa

SEQ ID NO: 505 - protein, 737 aa, Artificial Sequence; identical to SEQ ID NO: 464
  source: /note="Description of Artificial Sequence: Synthetic polypeptide"

SEQ ID NO: 506 - protein, 737 aa, Artificial Sequence
  source: /note="Description of Artificial Sequence: Synthetic polypeptide"
MAADGYLPDWLEDNLSEGIREWWDLKPGAPKPKANQQKQDDGRGLVLPGYKYLGPFNGLDKGEPVNAADAAALEHDKAYDQQLKAGDNPYLRYNHADAEFQERLQEDTSFGGNLGRAVLQAKKRVLEPLGLVEEAAKTAPGKKRPVEPSPQRSPDSSTGIGKKGQQPARKRLNFGQTGDSESVPDPQPIGEPPAGPSGLGSGTMAAGGGAPMADNNEGADGVGNASGNWHCDSTWLGDRVITTSTRTWALPTYNNHLYKQISSQSAGSTNDNVYFGYSTPWGYFDFNRFHCHFSPRDWQRLINNNWGFRPKKLNFKLFNIQVKEVTTNDGVTTIANNLTSTVQVFSDSEYQLPYVLGSAHQGCLPPFPADVFMIPQYGYLTLNNGSQSVGRSSFYCLEYFPSQMLRTGNNFTFSYTFEDVPFHSSYAHSQSLDRLMNPLIDQYLYYLARTQSNAGGTAGNRELQFYQGGPTTMAEQAKNWLPGPCFRQQRVSKTLDQNNNSNFAWTGATKYHLNGRNSLVNPGVAMATHKDDEERFFPSSGVLIFGKTGAANKTTLENVLMTNEEEIRPTNPVATEEYGTVSSNLQAANTAAQTQVVNNQGALPGMVWQNRDVYLQGPIWAKIPHTDGNFHPSPLMGGFGLKHPPPQILIKNTPVPANPPEVFTPAKFASFITQYSTGQVSVEIEWELQKENSKRWNPEIQYTSNFDKQTGVDFAVDSQGVYSEPRPIGTRYLTRNL

SEQ ID NO: 507 - DNA, 2217 bp, Artificial Sequence
  source: /note="Description of Artificial Sequence: Synthetic polynucleotide"
atggctgccgatggttatcttccagattggctcgaggacaacctctctgagggcattcgcgagtggtgggacctgaaacctggagccccgaaacccaaagccaaccagcaaaagcaggacgacggccggggtctggtgcttcctggctacaagtacctcggacccttcaacggactcgacaagggggagcccgtcaacgcggcggacgcagcggccctcgagcacgacaaggcctacgaccagcagctcaaagcgggtgacaatccgtacctgcggtataatcacgccgacgccgagtttcaggagcgtctgcaagaagatacgtcttttgggggcaacctcgggcgagcagtcttccaggccaagaagcgggttctcgaacctctcggtctggttgaggaaggcgctaagacggctcctggaaagaagagaccggtagagccgtcaccacagcgttcccccgactcctccacgggcatcggcaagaaaggccagcagcccgccagaaagagactcaatttcggtcagactggcgactcagagtcagtccccgaccctcaacctatcggagaacctccagcagcgccctctagtgtgggatctggtacaatggctgcaggcggtggcgcaccaatggcagacaataacgaaggtgccgacggagtgggtagttcctcgggaaattggcattgcgattccacatggctgggcgacagagtcatcaccaccagcacccgaacctgggccctgcccacctacaacaaccacctctacaagcaaatctccaacgggacctcgggaggcagcaccaacgacaacacctactttggctacagcaccccctgggggtattttgactttaacagattccactgccacttctcaccacgtgactggcagcgactcatcaacaacaactggggattccggcccaagagactcagcttcaagctcttcaacatccaggtcaaagaggtcacgcagaatgaaggcaccaagaccatcgccaataacctcaccagcaccatccaggtgtttacggactcggaataccagctgccgtacgtcctcggctctgcccaccagggctgcctgcctccgttcccggcggacgtcttcatgattcctcagtacggctacctgactctcaacaacggtagtcaggccgtgggacgttcctccttctactgcctggagtacttcccctctcagatgctgagaacgggcaacaacttttccttcagctacactttcgaggacgtgcctttccacagcagctacgcgcacagccagagtttggacaggctgatgaatcctctcatcgaccagtacctgtactacctgtcaagaacccagtctacgggaggcacagcgggaacccagcagttgctgttttctcaggccgggcctagcaacatgtcggctcaggccagaaactggctgcctggaccctgctacagacagcagcgcgtctccacgacactgtcgcaaaacaacaacagcaactttgcctggactggtgccaccaagtatcatctgaacggcagagactctctggtgaatccgggcgtcgccatggcaaccaacaaggacgacgaggaccgcttcttcccacccagcggcatcctcatgtttggcaagcagggagctggaaaagacaacgtggactatagcaacgtgatgctaaccagcgaggaagaaatcaagaccaccaaccccgtggccacagaacagtatggcgtggtggctgataacctacagcagcaaaacaccgctcctattgtgggggccgtcaacagccagggagccttacctggcatggtctggcagaaccgggacgtgtacctgcagggtcctatttgggccaagattcctcacacagatggcaactttcacccgtctcctttaatgggcggctttggacttaaacatccgcctcctcagatcctcatcaaaaacactcctgttcctgcggatcctccaacagcgttcaaccaggccaagctgaattctttcatcacgcagtacagcaccggacaagtcagcgtggtgatcgagtgggagctgcagaaggagaacagcaagcgctggaacccagagattcagtatacttccaactactacaaatctacaaatgtggactttgctgttaatactgagggtgtttactctgagcttcgccccattggcactcgttacctcacccgtaatctgtaa

SEQ ID NO: 508 - protein, 738 aa, Artificial Sequence
  source: /note="Description of Artificial Sequence: Synthetic polypeptide"
MAADGYLPDWLEDNLSEGIREWWDLKPGAPKPKANQQKQDDGRGLVLPGYKYLGPFNGLDKGEPVNAADAAALEHDKAYDQQLKAGDNPYLRYNHADAEFQERLQEDTSFGGNLGRAVFQAKKRVLEPLGLVEEGAKTAPGKKRPVEPSPQRSPDSSTGIGKKGQQPARKRLNFGQTGDSESVPDPQPIGEPPAAPSSVGSGTMAAGGGAPMADNNEGADGVGSSSGNWHCDSTWLGDRVITTSTRTWALPTYNNHLYKQISNGTSGGSTNDNTYFGYSTPWGYFDFNRFHCHFSPRDWQRLINNNWGFRPKRLSFKLFNIQVKEVTQNEGTKTIANNLTSTIQVFTDSEYQLPYVLGSAHQGCLPPFPADVFMIPQYGYLTLNNGSQAVGRSSFYCLEYFPSQMLRTGNNFSFSYTFEDVPFHSSYAHSQSLDRLMNPLIDQYLYYLSRTQSTGGTAGTQQLLFSQAGPSNMSAQARNWLPGPCYRQQRVSTTLSQNNNSNFAWTGATKYHLNGRDSLVNPGVAMATNKDDEDRFFPPSGILMFGKQGAGKDNVDYSNVMLTSEEEIKTTNPVATEQYGVVADNLQQQNTAPIVGAVNSQGALPGMVWQNRDVYLQGPIWAKIPHTDGNFHPSPLMGGFGLKHPPPQILIKNTPVPADPPTAFNQAKLNSFITQYSTGQVSVVIEWELQKENSKRWNPEIQYTSNYYKSTNVDFAVNTEGVYSELRPIGTRYLTRNL

SEQ ID NO: 509 - DNA, 2214 bp, Artificial Sequence
  source: /note="Description of Artificial Sequence: Synthetic polynucleotide"
atggctgctgacggttatcttccagattggctcgaggacaacctctctgagggcattcgcgagtggtgggacctgaaacctggagcccccaagcccaaggccaaccagcagaagcaggacgacggccggggtctggtgcttcctggctacaagtacctcggacccttcaacggactcgacaagggggagcccgtcaacgcggcggacgcagcggccctcgagcacgacaaggcctacgaccagcagctcaaagcgggtgacaatccgtacctgcggtataaccacgccgacgccgagtttcaggagcgtctgcaagaagatacgtcttttgggggcaacctcgggcgagcagtcttccaggccaagaagcgggttctcgaacctctcggtctggttgaggaagctgctaagacggctcctggaaagaagagaccggtagaaccgtcacctcagcgttcccccgactcctccacgggcatcggcaagaaaggccagcagcccgctagaaagagactgaactttgggcagactggcgactcagagtcagtccccgaccctcaaccaatcggagaaccaccagcaggcccctctggtctgggatctggtacaatggctgcaggcggtggcgccccaatggcagacaataacgaaggcgccgacggagtgggtaatgcctcaggaaattggcattgcgattccacatggctgggcgacagagtcatcaccaccagcacccgaacctgggctttgcccacctacaacaaccacctctacaagcaaatctccagtcagtcagcaggtagcaccaacgacaacgtctacttcggctacagcaccccctgggggtattttgacttcaacagattccactgtcacttctcaccacgtgactggcagcggctcatcaacaacaactggggattccggcccaagaagctcaacttcaagctgttcaacatccaggtcaaggaggtcacaacgaatgacggcgtcacgaccatcgccaataaccttaccagcacggttcaggtcttttcggactcggaataccagctgccctacgtcctcggctccgcacaccagggctgcctgcctccgttcccggcggacgtcttcatgattccccagtacggctacctgactctgaacaatggcagccaatcggtgggtcgttcctctttctactgcctggaatatttcccttctcaaatgctgagaacgggcaacaacttcaccatcagctacaccttcgaggacgttcccttccacagcagctacgcacacagccagagcctggaccggctgatgaatcctcttatcgaccagtacctgtattacctggccagaacacagagcaacgcaggaggcacagctggcaatcaggaactgcagttttatcagggcgggcctaccaccatggccgaacaagccaaaaactggctgcctggaccttgcttccggcaacaaagagtctccaagacgctggatcaaaacaacaacagcaactttgcttggactggtgccaccaaataccatctaaatggaagaaattcattggttaatcccggtgtcgccatggcaacccacaaggacgacgaggaacgcttcttcccttcgagcggagtcctgatttttggaaaaactggagcagctaataagactacactggaaaatgtgttaatgacaaatgaagaggaaattcgtcctaccaacccggtagccaccgaggaatacgggactgttagcagcaacctgcaggcggctaacactgcagcccagacacaagttgtcaacaaccagggagccttacctggtatggtctggcagaaccgggacgtgtacctgcagggtcccatctgggccaagattcctcacacagatggcaactttcacccgtctcctttaatgggcggctttggacttaaacatccgcctcctcagatcctcatcaaaaacactcctgttcctgcggatcctccaacagcgttcaaccaggccaagctgaattctttcatcacgcagtacagcaccggacaagtcagcgtggagatcgagtgggagctgcagaaggagaacagcaagcgctggaacccagagattcagtatacttccaactactacaaatctacaaatgtggactttgctgttaatactgagggtgtttactctgagcctcgccccattggcactcgttacctcacccgtaatctgtaa

SEQ ID NO: 510 - protein, 737 aa, Artificial Sequence
  source: /note="Description of Artificial Sequence: Synthetic polypeptide"
MAADGYLPDWLEDNLSEGIREWWDLKPGAPKPKANQQKQDDGRGLVLPGYKYLGPFNGLDKGEPVNAADAAALEHDKAYDQQLKAGDNPYLRYNHADAEFQERLQEDTSFGGNLGRAVFQAKKRVLEPLGLVEEAAKTAPGKKRPVEPSPQRSPDSSTGIGKKGQQPARKRLNFGQTGDSESVPDPQPIGEPPAGPSGLGSGTMAAGGGAPMADNNEGADGVGNASGNWHCDSTWLGDRVITTSTRTWALPTYNNHLYKQISSQSAGSTNDNVYFGYSTPWGYFDFNRFHCHFSPRDWQRLINNNWGFRPKKLNFKLFNIQVKEVTTNDGVTTIANNLTSTVQVFSDSEYQLPYVLGSAHQGCLPPFPADVFMIPQYGYLTLNNGSQSVGRSSFYCLEYFPSQMLRTGNNFTISYTFEDVPFHSSYAHSQSLDRLMNPLIDQYLYYLARTQSNAGGTAGNQELQFYQGGPTTMAEQAKNWLPGPCFRQQRVSKTLDQNNNSNFAWTGATKYHLNGRNSLVNPGVAMATHKDDEERFFPSSGVLIFGKTGAANKTTLENVLMTNEEEIRPTNPVATEEYGTVSSNLQAANTAAQTQVVNNQGALPGMVWQNRDVYLQGPIWAKIPHTDGNFHPSPLMGGFGLKHPPPQILIKNTPVPADPPTAFNQAKLNSFITQYSTGQVSVEIEWELQKENSKRWNPEIQYTSNYYKSTNVDFAVNTEGVYSEPRPIGTRYLTRNL

SEQ ID NO: 511 - DNA, 2217 bp, Artificial Sequence
  source: /note="Description of Artificial Sequence: Synthetic polynucleotide"
atggctgccgatggttatcttccagattggctcgaggacaacctctctgagggcattcgcgagtggtgggacctgaaacctggagccccgaaacccaaagccaaccagcaaaagcaggacgacggccggggtctggtgcttcctggctacaagtacctcggacccttcaacggactcgacaagggggagcccgtcaacgcggcggacgcagcggccctcgagcacgacaaggcctacgaccagcagctcaaagcgggtgacaatccgtacctgcggtataatcacgccgacgccgagtttcaggagcgtctgcaagaagatacgtcttttgggggcaacctcgggcgagcagtcttccaggccaagaagcgggttctcgaacctctcggtctggttgaggaaggcgctaagacggctcctggaaagaagagaccggtagagccgtcaccacagcgttcccccgactcctccacgggcatcggcaagaaaggccagcagcccgccagaaagagactcaatttcggtcagactggcgactcagagtcagtccccgaccctcaacctatcggagaacctccagcagcgccctctagtgtgggatctggtacaatggctgcaggcggtggcgcaccaatggcagacaataacgaaggtgccgacggagtgggtagttcctcgggaaattggcattgcgattccacatggctgggcgacagagtcatcaccaccagcacccgaacctgggccctgcccgcctacaacaaccacctctacaagcaaatctccaacgggacctcgggaggcagcaccaacgacaacacctactttggctacagcaccccctgggggtattttgactttaacagattccactgccacttctcaccacgtgactggcagcgactcatcaacaacaactggggattccggcccaagagactcagcttcaagctcttcaacatccaggtcaaagaggtcacgcagaatgaaggcaccaagaccatcgccaataacctcaccagcaccatccaggtgtttacggactcggaataccagctgccgtacgtcctcggctctgcccaccagggctgcctgcctccgttcccggcggatgtcttcatgattcctcagtacggctacctgactctcaacaacggtagtcaggccgtgggacgttcctccttctactgcctggagtacttcccctctcagatgctgagaacgggcaacaacttttccttcagctacactttcgaggacgtgcctttccacagcagctacgcgcacagccagagtttggacaggctgatgaatcctctcatcgaccagtacctgtactacctgtcaagaacccagtctacgggaggcacagcgggaacccagcagttgctgttttctcaggccgggcctagcaacatgtcggctcaggccagaaactggctgcctggaccctgctacagacagcagcgcgtctccacgacactgtcgcaaaacaacaacagcaactttgcctggactggtgccaccaagtatcatctgagcggcagagactctctggtgaatccgggcgtcgccatggcaaccaacaaggacgacgaggaccgcttcttcccatccagcggcatcctcatgtttggcaagcagggagctggaaaagacaacgtggactatagcaacgtgatgctaaccagcgaggaagaaatcaagaccaccaaccccgtggccacagaacagtatggcgtggtggctgataacctacagcagcaaaacaccgctcctattgtgggggccgtcaacagccagggagccttacctggcatggtctggcagaaccgggacgtgtacctgcagggtcctatttgggccaagattcctcacacagatggcaactttcacccgtctcctttaatgggcggctttggacttaaacatccgcctcctcagatcctcatcaaaaacactcctgttcctgcggatcctccaacagcgttcaaccaggccaagctgaattcttccatcacgcagtacagcaccggacaagtcagcgtggagatcgagtgggagctgcagaaggagaacagcaagcgctggaacccagagattcagtatacttccaactactacaaatctacaaatgtggactttgctgttaatactgagggtgtttactctgagcctcgccccattggcactcgttacctcacccgtaatttgtaa

SEQ ID NO: 512 - protein, 738 aa, Artificial Sequence
  source: /note="Description of Artificial Sequence: Synthetic polypeptide"
MAADGYLPDWLEDNLSEGIREWWDLKPGAPKPKANQQKQDDGRGLVLPGYKYLGPFNGLDKGEPVNAADAAALEHDKAYDQQLKAGDNPYLRYNHADAEFQERLQEDTSFGGNLGRAVFQAKKRVLEPLGLVEEGAKTAPGKKRPVEPSPQRSPDSSTGIGKKGQQPARKRLNFGQTGDSESVPDPQPIGEPPAAPSSVGSGTMAAGGGAPMADNNEGADGVGSSSGNWHCDSTWLGDRVITTSTRTWALPAYNNHLYKQISNGTSGGSTNDNTYFGYSTPWGYFDFNRFHCHFSPRDWQRLINNNWGFRPKRLSFKLFNIQVKEVTQNEGTKTIANNLTSTIQVFTDSEYQLPYVLGSAHQGCLPPFPADVFMIPQYGYLTLNNGSQAVGRSSFYCLEYFPSQMLRTGNNFSFSYTFEDVPFHSSYAHSQSLDRLMNPLIDQYLYYLSRTQSTGGTAGTQQLLFSQAGPSNMSAQARNWLPGPCYRQQRVSTTLSQNNNSNFAWTGATKYHLSGRDSLVNPGVAMATNKDDEDRFFPSSGILMFGKQGAGKDNVDYSNVMLTSEEEIKTTNPVATEQYGVVADNLQQQNTAPIVGAVNSQGALPGMVWQNRDVYLQGPIWAKIPHTDGNFHPSPLMGGFGLKHPPPQILIKNTPVPADPPTAFNQAKLNSSITQYSTGQVSVEIEWELQKENSKRWNPEIQYTSNYYKSTNVDFAVNTEGVYSEPRPIGTRYLTRNL

SEQ ID NO: 513 - protein, 736 aa, Artificial Sequence; identical to SEQ ID NO: 13
  source: /note="Description of Artificial Sequence: Synthetic polypeptide"

SEQ ID NO: 514 - DNA, 2217 bp, Artificial Sequence
  source: /note="Description of Artificial Sequence: Synthetic polynucleotide"
atggctgctgacggttatcttccagattggctcgaggacaacctctctgagggcattcgcgagtggtgggacctgaaacctggagcccccaagcccaaggccaaccagcagaagcaggacgacggccggggtctggtgcttcctggctacaagtacctcggacccttcaacggactcgacaagggggagcccgtcaacgcggcggacgcagcggccctcgagcacgacaaggcctacgaccagcagctcaaagcgggtgacaatccgtacctgcggtataaccacgccgacgccgagtttcaggagcgtctgcaagaagatacgtcttttgggggcaacctcgggcgagcagtcttccaggccaagaagcgggttctcgaacctctcggtctggttgaggaagctgctaagacggctcctggaaagaagagaccggtagaaccgtcacctcagcgttcccccgactcctccacgggcatcggcaagaaaggccagcagcccgctaaaaagagactgaactttggtcagactggcgactcagagtcagtccccgaccctcaaccaatcggagaaccaccagcaggcccctctggtctgggatctggtacaatggctgcaggcggtggcgctccaatggcagacaataacgaaggcgccgacggagtgggtagttcctcaggaaattggcattgcgattccacatggctgggcgacagagtcatcaccaccagcacccgaacctgggccctgcccacctacaacaaccacctctacaagcaaatatccaatgggacatcgggaggaagcaccaacgacaacacctacttcggctacagcaccccctgggggtattttgacttcaacagattccactgccacttctcaccacgtgactggcagcgactcatcaacaacaactggggattccggccaaaaagactcagcttcaagctcttcaacatccaggtcaaggaggtcacgcagaatgaaggcaccaagaccatcgccaataaccttaccagcacgattcaggtatttacggactcggaataccagctgccgtacgtcctcggctccgcgcaccagggctgcctgcctccgttcccggcggacgtcttcatgattccccagtacggctaccttacactgaacaatggaagtcaagccgtaggccgttcctccttctactgcctggaatattttccatctcaaatgctgcgaactggaaacaattttgaattcagctacaccttcgaggacgtgcctttccacagcagctacgcacacagccagagcttggaccgactgatgaatcctctcatcgaccagtacctgtactacttatccagaactcagtccacaggaggaactcaaggtacccagcaattgttattttctcaagctgggcctgcaaacatgtcggctcaggctaagaactggctacctggaccttgctaccggcagcagcgagtctctacgacactgtcgcaaaacaacaacagcaactttgcttggactggtgccaccaaatatcacctgaacggaagagactctttggtaaatcccggtgtcgccatggcaacccacaaggacgacgaggaacgcttcttcccgtcgagtggagtcctgatgtttggaaaacagggtgctggaagagacaatgtggactacagcagcgttatgctaaccagcgaagaagaaattaaaaccactaaccctgtagccacagaacaatacggtgtggtggctgacaacttgcagcaaaccaatacagggcctattgtgggaaatgtcaacagccaaggagccttacctggcatggtctggcagaaccgagacgtgtacctgcagggtcccatctgggccaagattcctcacacggacggcaacttccacccttcaccgctaatgggaggatttggactgaagcacccacctcctcagatcctgatcaagaacacgccggtacctgcggatcctccaacaacgttcagccaggcgaaattggcttccttcattacgcagtacagcaccggacaggtcagcgtggaaatcgagtgggagctgcagaaggagaacagcaaacgctggaacccagagattcagtacacttcaaactactacaaatctacaaatgtggactttgctgtcaatacagagggaacttattctgagcctcgccccattggtactcgttacctcacccgtaatctgtaa

SEQ ID NO: 515 - protein, 738 aa, Artificial Sequence
  source: /note="Description of Artificial Sequence: Synthetic polypeptide"
MAADGYLPDWLEDNLSEGIREWWDLKPGAPKPKANQQKQDDGRGLVLPGYKYLGPFNGLDKGEPVNAADAAALEHDKAYDQQLKAGDNPYLRYNHADAEFQERLQEDTSFGGNLGRAVFQAKKRVLEPLGLVEEGAKTAPGKKRPVEPSPQRSPDSSTGIGKKGQQPARKRLNFGQTGDSESVPDPQPLGEPPAAPSSVGSGTMAAGGGAPMADNNEGADGVGSSSGNWHCDSTWLGDRVITTSTRTWALPTYNNHLYKQISNGTSGGSTNDNTYFGYSTPWGYFDFNRFHCHFSPRDWQRLINNNWGFRPKRLSFKLFNIQVKEVTQNEGTKTIANNLTSTIQVFTDSEYQLPYVLGSAHQGCLPPFPADVFMIPQYGYLTLNNGSQAVGRSSFYCLEYFPSQMLRTGNNFSFSYTFEDVPFHSSYAHSQSLDRLMNPLIDQYLYYLSRTQSTGGTAGTQQLLFSQAGPSNMSAQARNWLPGPCYRQQRVSTTLSQNNNSNFAWTGATKYHLNGRDSLVNPGVAMATNKDDEDRFFPSSGILMFGKQGAGKDNVDYSNVMLTSEEEIKTTNPVATEQYGVVADNLQRQNTAPIVGAVNSQGALPGMVWQNRDVYLQGPIWAKIPHTDGNFHPSPLMGGFGLKHPPPQILIKNTPVPADPPTAFNQAKLNSFITQYSTGQVSVEIEWELQKENSKRWNPEIQYTSNYYKSTNVDFAVNTEGVYSEPRPIGTRYLTRNL

SEQ ID NO: 516 - protein, 736 aa, Artificial Sequence
  source: /note="Description of Artificial Sequence: Synthetic polypeptide"
MAADGYLPDWLEDNLSEGIREWLNLKPGAPQPKANQQKQDNARGLVLPGYKYLGPFNGLDKGDPVNEADAAALEHDKAYGQQLKAGDNPYLKYNHADAEFQERLQKDTSFGGNLGKAVFQAKKRILEPLGLVETPAKTAPGKKRPVDPSPQRSPDSSSGIGKKSPHPARKRLNFGQTGEAESVPDPQPIGEPPSDPSSVGSGTMAAGGGAPMADNNEGADGVGNSSGNWHCDSTWLGDRVITTSTRTWALPTYNNHLYKQISSQSGATNDNHYFGYSTPWGYFDFNRFHCHFSPRDWQRLINNNWGFRPKRLSFKLFNIQVKEVTQNDGTTTIANNLTSTVQVFTDSEYQLPYVLGSAHQGCLPPFPADVFMIPQYGYLTLNNGSQAVGRSSFYCLEYFPSQMLRTGNNFQFSYTFEDVPFHSSYAHSQSLDRLMNPLIDQYLYYLSKTQGTNATVQGAKLQFSQAGPSNMRDQARNWLPGPCYRQQRVSKTANDNNNSEYAWTGATKYHLNGRDSLVNPGPAMASHKDDEEKFFPMNGTLVFGKNGAGNSNVDIENVMITDEEEIRTTNPVATEQYGVVSDNLQSSNTRPITGDVDSQGVLPGMVWQDRDVYLQGPIWAKIPHTDGHFHPSPLMGGFGLKHPPPQILIKNTPVPANPATTFTPGKFASFITQYSTGQVSVQIEWELQKENSKRWNPEIQYTSNYNKSVNVDFTVDTNGVYSEPRPIGTRYLTRNL

SEQ ID NO: 517 - protein, 736 aa, Artificial Sequence; identical to SEQ ID NO: 92
  source: /note="Description of Artificial Sequence: Synthetic polypeptide"

SEQ ID NO: 518 - protein, 736 aa, Artificial Sequence
  source: /note="Description of Artificial Sequence: Synthetic polypeptide"
MAADGYLPDWLEDNLSEGIREWWDLKPGAPKPKANQQKQDDGRGLVLPGYKYLGPFNGLDKGEPVNAADAAALEHDKAYDQQLKAGDNPYLRYNHADAEFQERLQEDTSFGGNLGRAVFQAKKRVLEPLGLVEEGAKTAPGKKRPVEQSPQEPDSSSGIGKTGQQPAKKRLNFGQTGDSESVPDPQPLGEPPAAPSGLGPNTMASGGGAPMADNNEGADGVGNSSGNWHCDSTWLGDRVITTSTRTWALPTYNNHLYKQISNGTSGGSTNDNTYFGYSTPWGYFDFNRFHCHFSPRDWQRLINNNWGFRPKRLNFKLFNIQVKEVTTNEGTKTIANNLTSTVQVFTDSEYQLPYVLGSAHQGCLPPFPADVFMVPQYGYLTLNNGSQALGRSSFYCLEYFPSQMLRTGNNFQFSYTFEDVPFHSSYAHSQSLDRLMNPLIDQYLYYLVRTQTTGTGGTQTLAFSQAGPSSMANQARNWVPGPCYRQQRVSTTTNQNNNSNFAWTGAAKFKLNGRDSLMNPGVAMASHKDDEDRFFPSSGVLIFGKQGAGNDGVDYSQVLITDEEEIKATNPVATEEYGAVAINNQAANTQAQTGLVHNQGVIPGMVWQNRDVYLQGPIWAKIPHTDGNFHPSPLMGGFGLKHPPPQILIKNTPVPADPPLTFNQAKLNSFITQYSTGQVSVEIEWELQKENSKRWNPEIQYTSNYYKSTNVDFAVNTEGVYSEPRPIGTRYLTRNL

SEQ ID NO: 519 - protein, 736 aa, Artificial Sequence; identical to SEQ ID NO: 518
  source: /note="Description of Artificial Sequence: Synthetic polypeptide"

SEQ ID NO: 520 - protein, 736 aa, Artificial Sequence
  source: /note="Description of Artificial Sequence: Synthetic polypeptide"
MAADGYLPDWLEDNLSEGIREWWDLKPGAPKPKANQQKQDDGRGLVLPGYKYLGPFNGLDKGEPVNAADAAALEHDKAYDQQLKAGDNPYLRYNHADAEFQERLQEDTSFGGNLGRAVFQAKKRVLEPLGLVEEGAKTAPGKKRPVEQSPQEPDSSSGIGKTGQQPAKKRLNFGQTGDSESVPDPQPLGEPPAAPSGLGPNTMASGGGAPMADNNEGADGVGNSSGNWHCDSTWLGDRVITTSTRTWALPTYNNHLYKQISNGTSGGSTNDNTYFGYSTPWGYFDFNRFHCHFSPRDWQRLINNNWGFRPKRLNFKLFNIQVKEVTTNEGTKTIANNLTSTVQVFTDSEYQLPYVLGSAHQGCLPPFPADVFMVPQYGYLTLNNGSQALGRSSFYCLEYFPSQMLRTGNNFQFSYTFEDVPFHSSYAHSQSLDRLMNPLIDQYLYYLVRTQTTGTGGTQTLAFSQAGPSSMANQARNWVPGPCYRQQRVSTTTNQNNNSNFAWTGAAKFKLNGRDSLMNPGVAMASHKDDEDRFFPSSGVLIFGKQGAGNDGVDYSQVLITDEEEIKATNPVATEEYGAVAINNQRANTQAQTGLVHNQGVIPGMVWQNRDVYLQGPIWAKIPHTDGNFHPSPLMGGFGLKHPPPQILIKNTPVPADPPLTFNQAKLNSFITQYSTGQVSVEIEWELQKENSKRWNPEIQYTSNYYKSTNVDFAVNTEGVYSEPRPIGTRYLTRNL

SEQ ID NO: 521 - protein, 736 aa, Artificial Sequence
  source: /note="Description of Artificial Sequence: Synthetic polypeptide"
MAADGYLPDWLEDNLSEGIREWWDLKPGAPKPKANQQKQDDGRGLVLPGYKYLGPFNGLDKGEPVNAADAAALEHDKAYDQQLKAGDNPYLRYNHADAEFQERLQEDTSFGGNLGRAVFQAKKRVLEPLGLVEEGAKTAPGKKRPVEQSPQEPDSSSGIGKTGQQPAKKRLNFGQTGDSESVPDPQPLGEPPAAPSGLGPNTMASGGGAPMADNNEGADGVGNSSGNWHCDSTWLGDRVITTSTRTWALPTYNNHLYKQISNGTSGGSTNDNTYFGYSTPWGYFDFNRFHCHFSPRDWQRLINNNWGFRPKRLNFKLFNIQVKEVTTNEGTKTIANNLTSTVQVFTDSEYQLPYVLGSAHQGCLPPFPADVFMVPQYGYLTLNNGSQALGRSSFYCLEYFPSQMLRTGNNFQFSYTFEDVPFHSSYAHSQSLDRLMNPLIDQYLYYLVRTQTTGTGGTQTLAFSQAGPSSMANQARNWVPGPCYRQQRVSTTTNQNNNSNFAWTGAAKFKLNGRDSLMNPGVAMASHKDDEDAFFPSSGVLIFGKQGAGNDGVDYSQVLITDEEEIKATNPVATEEYGAVAINNQAANTQAQTGLVHNQGVIPGMVWQNRDVYLQGPIWAKIPHTDGNFHPSPLMGGFGLKHPPPQILIKNTPVPADPPLTFNQAKLNSFITQYSTGQVSVEIEWELQKENSKRWNPEIQYTSNYYKSTNVDFAVNTEGVYSEPRPIGTRYLTRNL

SEQ ID NO: 522 - DNA, 1803 bp, Bovine adeno-associated virus
acggcgcctgcggcaaaaaagaggcctctagagcagagtcctcaagagccagactcctcgagcggagttggcaagaaaggcaaacagcctgccagaaagagactcaactttgacgacgaacctggagccggagacgggcctcccccagaaggaccatcttccggagctatgtctactgagactgaaatgcgtgcagcagctggcggaaatggtggcgatgcgggacaaggtgccgagggagtgggtaatgcctccggtgattggcattgcgattccacttggtcagagagccacgtcaccaccacctcaacccgcacctgggtcctgccgacctacaacaaccacctgtacctgcggctcggctcgagcaacgccagcgacaccttcaacggattctccaccccctggggatactttgactttaaccgcttccactgccacttctcgccaagagactggcaaaggctcatcaacaaccactggggactgcgccccaaaagcatgcaagtccgcatcttcaacatccaagttaaggaggtcacgacgtctaacggggagacgaccgtatccaacaacctcaccagcacggtccagatctttgcggacagcacgtacgagctcccgtacgtgatggatgcaggtcaggagggcagcttgcctcctttccccaacgacgtgttcatggtgcctcagtacgggtactgcggactggtaaccggaggcagctctcaaaaccagacagacagaaatgccttctactgtctggagtactttcccagccagatgctgagaaccggaaacaactttgagatggtgtacaagtttgaaaacgtgcccttccactccatgtacgctcacagccagagcctggataggctgatgaacccgctgctggaccagtacctgtgggagctccagtctaccacctctggaggaactctcaaccagggcaattcagccaccaactttgccaagctgaccaaaacaaacttttctggctaccgcaaaaactggctcccggggcccatgatgaagcagcagagattctccaagactgccagtcaaaactacaagattccccagggaagaaacaacagtctgctccattatgagaccagaactaccctcgacggaagatggagcaattttgccccgggaacggccatggcaaccgcagccaacgacgccaccgacttctctcaggcccagctcatctttgcggggcccaacatcaccggcaacaccaccacagatgccaataacctgatgttcacttcagaagatgaacttagggccaccaacccccgggacactgacctgtttggccacctggcaaccaaccagcaaaacgccaccaccgttcctaccgtagacgacgtggacggagtcggcgtgtacccgggaatggtgtggcaggacagagacatttactaccaagggcccatttgggccaaaattccacacacggatggacactttcacccgtctcctctcattggcggatttggactgaaaagcccgcctccacaaatattcatcaaaaacactcctgtacccgccaatcccgcaacgaccttctctccggccagaatcaacagcttcatcacccagtacagcaccggacaggtggctgtcaaaatagaatgggaaatccagaaggagcggtccaagagatggaacccagaggtccagttcacgtccaactacggagcacaggactcgcttctctgggctcccgacaacgccggagcctacaaagagcccagggccattggatcccgatacctcaccaaccacctctag

SEQ ID NO: 523 - DNA, 1617 bp, Bovine adeno-associated virus
atgcgtgcagcagctggcggaaatggtggcgatgcgggacaaggtgccgagggagtgggtaatgcctccggtgattggcattgcgattccacttggtcagagagccacgtcaccaccacctcaacccgcacctgggtcctgccgacctacaacaaccacctgtacctgcggctcggctcgagcaacgccagcgacaccttcaacggattctccaccccctggggatactttgactttaaccgcttccactgccacttctcgccaagagactggcaaaggctcatcaacaaccactggggactgcgccccaaaagcatgcaagtccgcatcttcaacatccaagttaaggaggtcacgacgtctaacggggagacgaccgtatccaacaacctcaccagcacggtccagatctttgcggacagcacgtacgagctcccgtacgtgatggatgcaggtcaggagggcagcttgcctcctttccccaacgacgtgttcatggtgcctcagtacgggtactgcggactggtaaccggaggcagctctcaaaaccagacagacagaaatgccttctactgtctggagtactttcccagccagatgctgagaaccggaaacaactttgagatggtgtacaagtttgaaaacgtgcccttccactccatgtacgctcacagccagagcctggataggctgatgaacccgctgctggaccagtacctgtgggagctccagtctaccacctctggaggaactctcaaccagggcaattcagccaccaactttgccaagctgaccaaaacaaacttttctggctaccgcaaaaactggctcccggggcccatgatgaagcagcagagattctccaagactgccagtcaaaactacaagattccccagggaagaaacaacagtctgctccattatgagaccagaactaccctcgacggaagatggagcaattttgccccgggaacggccatggcaaccgcagccaacgacgccaccgacttctctcaggcccagctcatctttgcggggcccaacatcaccggcaacaccaccacagatgccaataacctgatgttcacttcagaagatgaacttagggccaccaacccccgggacactgacctgtttggccacctggcaaccaaccagcaaaacgccaccaccgttcctaccgtagacgacgtggacggagtcggcgtgtacccgggaatggtgtggcaggacagagacatttactaccaagggcccatttgggccaaaattccacacacggatggacactttcacccgtctcctctcattggcggatttggactgaaaagcccgcctccacaaatattcatcaaaaacactcctgtacccgccaatcccgcaacgaccttctctccggccagaatcaacagcttcatcacccagtacagcaccggacaggtggctgtcaaaatagaatgggaaatccagaaggagcggtccaagagatggaacccagaggtccagttcacgtccaactacggagcacaggactcgcttctctgggctcccgacaacgccggagcctacaaagagcccagggccattggatcccgatacctcaccaaccacctctag

SEQ ID NO: 524 - DNA, 1173 bp, Bovine adeno-associated virus
atggcgctggtaagctggctggtggaacatggcatcacttccgagaagcagtggattcaggagaatcaggagagctacctgtccttcaactccacgggaaactctcggagccagattaaagccgcgcttgacaacgcgtcaaaaattatgagtctgaccaaatctgcctcagactatctcgtgggacagactgttccagaggacatttctgaaaacagaatctggcagatttttgatctcaacggctacgacccggcatacgcgggctctgttctctacggctggtgcactcgcgcctttggaaagaggaacaccgtctggctgtatggacccgcgaccaccggaaagaccaacatcgcggaagccatctctcacaccgtgcccttttatggctgtgtgaactggactaatgagaactttccctttaatgactgtgtggaaaaaatgttgatctggtgggaggagggaaagatgaccagcaaggtggtggaacccgccaaggccatcttgggggggtctagagtacgagtggatcaaaaatgtaaatcctctgtacaagtagactctaccccggtgattatcacctccaatactaacatgtgtgtggtggtggatgggaactccacgacctttgaacaccagcagccgctggaagaccgcatgttcagatttgaactcatgcggcggctcccgccagattttggcaagattaccaagcaggaagtcaaagacttttttgcttgggcaaaggtcaaccaggtgccggtgactcacgagtttatggttcccaagaaagtggcgggaactgagagggcggagacttctagaaaacgcccactggatgacgtcaccaataccaactataaaagtccggagaagcgggcccggctctcagttgttcctgagacgcctcgcagttcagacgtgcctgtagagcccgctcctctgcgacctctcaactggtcttccaggtatgaatgcagatgtgactatcatgctaaatttgactctgtaacgggggaatgtgacgagtgtgaatatttgaatcggggcaaaaatggctgtatctttcataatgctacacattgtcaaatttgtcacgctgttcctccatgggaaaaggaaaatgtgtcagattttaatgattttgatgactgtaataaagagcagtaa

SEQ ID NO: 525 - DNA, 1833 bp, Bovine adeno-associated virus
atggctaccttctatgaagtcattgttcgcgttccatttgatgtggaagagcacctgcctggaatttctgacaactttgtagactgggtaactggtcaaatttgggagctgcctcccgagtcagatttgaatttgactctgattgagcagcctcagctgacggtggctgacagaattcgccgcgtgttcctgtacgagtggaacaaattttccaagcaggagagcaaattctttgtgcagtttgaaaagggatctgaatattttcatctgcacacgctcgtggagacctccggcatctcttctatggtccttggccgctacgtgagtcagattcgcgcccagctggtgaaggtggtgttccagaacattgagccgcggattaacgactgggtcgccatcaccaaggtaaagaagggcggagccaataaggtggtggattctgggtatattcccgcctacctgctgccgaaggtccaaccagagcttcagtgggcgtggactaacctcgaagagtataaattggccgccctcaatctggaggagcgcaaacggctcgtcgctcagtttcagcttgagtcctcgcagcgctcgcaagaggcatcttcccagagggacgtttcggctgacccggtcatcaagagcaagacttcccagaaatacatggcgctggtaagctggctggtggaacatggcatcacttccgagaagcagtggattcaggagaatcaggagagctacctgtccttcaactccacgggaaactctcggagccagattaaagccgcgcttgacaacgcgtcaaaaattatgagtctgaccaaatctgcctcagactatctcgtgggacagactgttccagaggacatttctgaaaacagaatctggcagatttttgatctcaacggctacgacccggcatacgcgggctctgttctctacggctggtgcactcgcgcctttggaaagaggaacaccgtctggctgtatggacccgcgaccaccggaaagaccaacatcgcggaagccatctctcacaccgtgcccttttatggctgtgtgaactggactaatgagaactttccctttaatgactgtgtggaaaaaatgttgatctggtgggaggagggaaagatgaccagcaaggtggtggaacccgccaaggccatcttgggggggtctagagtacgagtggatcaaaaatgtaaatcctctgtacaagtagactctaccccggtgattatcacctccaatactaacatgtgtgtggtggtggatgggaactccacgacctttgaacaccagcagccgctggaagaccgcatgttcagatttgaactcatgcggcggctcccgccagattttggcaagattaccaagcaggaagtcaaagacttttttgcttgggcaaaggtcaaccaggtgccggtgactcacgagtttatggttcccaagaaagtggcgggaactgagagggcggagacttctagaaaacgcccactggatgacgtcaccaataccaactataaaagtccggagaagcgggcccggctctcagttgttcctgagacgcctcgcagttcagacgtgcctgtagagcccgctcctctgcgacctctcaactggtcttccaggtatgaatgcagatgtgactatcatgctaaatttgactctgtaacgggggaatgtgacgagtgtgaatatttgaatcggggcaaaaatggctgtatctttcataatgctacacattgtcaaatttgtcacgctgttcctccatgggaaaaggaaaatgtgtcagattttaatgattttgatgactgtaataaagagcagtaa

SEQ ID NO: 526 - DNA, 2211 bp, Bovine adeno-associated virus
atgtcttttgttgaccaccctccagattggttggaatcgatcggcgacggctttcgtgaatttctcggccttgaggcgggtcccccgaaacccaaggccaatcaacagaagcaagataacgctcgaggtcttgtgcttcctgggtacaagtatcttggtcctgggaacggccttgataagggcgatcctgtcaattttgctgacgaggttgcccgagagcacgacctctcctaccagaaacagcttgaggcgggcgataacccttacctcaagtacaaccacgcggacgcagagtttcaggagaaactcgcttctgacacttcttttgggggaaaccttgggaaggctgttttccaggctaaaaagaggattctcgaacctcttggcctggttgagacgccggataaaacggcgcctgcggcaaaaaagaggcctctagagcagagtcctcaagagccagactcctcgagcggagttggcaagaaaggcaaacagcctgccagaaagagactcaactttgacgacgaacctggagccggagacgggcctcccccagaaggaccatcttccggagctatgtctactgagactgaaatgcgtgcagcagctggcggaaatggtggcgatgcgggacaaggtgccgagggagtgggtaatgcctccggtgattggcattgcgattccacttggtcagagagccacgtcaccaccacctcaacccgcacctgggtcctgccgacctacaacaaccacctgtacctgcggctcggctcgagcaacgccagcgacaccttcaacggattctccaccccctggggatactttgactttaaccgcttccactgccacttctcgccaagagactggcaaaggctcatcaacaaccactggggactgcgccccaaaagcatgcaagtccgcatcttcaacatccaagttaaggaggtcacgacgtctaacggggagacgaccgtatccaacaacctcaccagcacggtccagatctttgcggacagcacgtacgagctcccgtacgtgatggatgcaggtcaggagggcagcttgcctcctttccccaacgacgtgttcatggtgcctcagtacgggtactgcggactggtaaccggaggcagctctcaaaaccagacagacagaaatgccttctactgtctggagtactttcccagccagatgctgagaaccggaaacaactttgagatggtgtacaagtttgaaaacgtgcccttccactccatgtacgctcacagccagagcctggataggctgatgaacccgctgctggaccagtacctgtgggagctccagtctaccacctctggaggaactctcaaccagggcaattcagccaccaactttgccaagctgaccaaaacaaacttttctggctaccgcaaaaactggctcccggggcccatgatgaagcagcagagattctccaagactgccagtcaaaactacaagattccccagggaagaaacaacagtctgctccattatgagaccagaactaccctcgacggaagatggagcaattttgccccgggaacggccatggcaaccgcagccaacgacgccaccgacttctctcaggcccagctcatctttgcggggcccaacatcaccggcaacaccaccacagatgccaataacctgatgttcacttcagaagatgaacttagggccaccaacccccgggacactgacctgtttggccacctggcaaccaaccagcaaaacgccaccaccgttcctaccgtagacgacgtggacggagtcggcgtgtacccgggaatggtgtggcaggacagagacatttactaccaagggcccatttgggccaaaattccacacacggatggacactttcacccgtctcctctcattggcggatttggactgaaaagcccgcctccacaaatattcatcaaaaacactcctgtacccgccaatcccgcaacgaccttctctccggccagaatcaacagcttcatcacccagtacagcaccggacaggtggctgtcaaaatagaatgggaaatccagaaggagcggtccaagagatggaacccagaggtccagttcacgtccaactacggagcacaggactcgcttctctgggctcccgacaacgccggagcctacaaagagcccagggccattggatcccgatacctcaccaaccacctctag

SEQ ID NO: 527 - DNA, 4694 bp, Bovine adeno-associated virus
gtggcactcccccccctgtcgcgttcgctcgttcgctggctcgattgggggggtggcagctcaaagagctgccagacgacggccctctgggccgtcgcccccccaatcgagccagcgaacgagcgaacgcgacaggggggggagtgccacactctctagcaagggggttttgtaggtggtgatgtcattgttgatgtcattatagttgtcacgcgatagttaatgattaacagtcatgtgatgtgtgttatccaataggatgaaagcgcgcgaatgagatctcgcgagacttccggggtataaaaggggtgagtgaacgagcccgccgccattctctgctctggactgctagaggaccctcgctgccatggctaccttctatgaagtcattgttcgcgttccatttgatgtggaagagcacctgcctggaatttctgacaactttgtagactgggtaactggtcaaatttgggagctgcctcccgagtcagatttgaatttgactctgattgagcagcctcagctgacggtggctgacagaattcgccgcgtgttcctgtacgagtggaacaaattttccaagcaggagagcaaattctttgtgcagtttgaaaagggatctgaatattttcatctgcacacgctcgtggagacctccggcatctcttctatggtccttggccgctacgtgagtcagattcgcgcccagctggtgaaggtggtgttccagaacattgagccgcggattaacgactgggtcgccatcaccaaggtaaagaagggcggagccaataaggtggtggattctgggtatattcccgcctacctgctgccgaaggtccaaccagagcttcagtgggcgtggactaacctcgaagagtataaattggccgccctcaatctggaggagcgcaaacggctcgtcgctcagtttcagcttgagtcctcgcagcgctcgcaagaggcatcttcccagagggacgtttcggctgacccggtcatcaagagcaagacttcccagaaatacatggcgctggtaagctggctggtggaacatggcatcacttccgagaagcagtggattcaggagaatcaggagagctacctgtccttcaactccacgggaaactctcggagccagattaaagccgcgcttgacaacgcgtcaaaaattatgagtctgaccaaatctgcctcagactatctcgtgggacagactgttccagaggacatttctgaaaacagaatctggcagatttttgatctcaacggctacgacccggcatacgcgggctctgttctctacggctggtgcactcgcgcctttggaaagaggaacaccgtctggctgtatggacccgcgaccaccggaaagaccaacatcgcggaagccatctctcacaccgtgcccttttatggctgtgtgaactggactaatgagaactttccctttaatgactgtgtggaaaaaatgttgatctggtgggaggagggaaagatgaccagcaaggtggtggaacccgccaaggccatcttgggggggtctagagtacgagtggatcaaaaatgtaaatcctctgtacaagtagactctaccccggtgattatcacctccaatactaacatgtgtgtggtggtggatgggaactccacgacctttgaacaccagcagccgctggaagaccgcatgttcagatttgaactcatgcggcggctcccgccagattttggcaagattaccaagcaggaagtcaaagacttttttgcttgggcaaaggtcaaccaggtgccggtgactcacgagtttatggttcccaagaaagtggcgggaactgagagggcggagacttctagaaaacgcccactggatgacgtcaccaataccaactataaaagtccggagaagcgggcccggctctcagttgttcctgagacgcctcgcagttcagacgtgcctgtagagcccgctcctctgcgacctctcaactggtcttccaggtatgaatgcagatgtgactatcatgctaaatttgactctgtaacgggggaatgtgacgagtgtgaatatttgaatcggggcaaaaatggctgtatctttcataatgctacacattgtcaaatttgtcacgctgttcctccatgggaaaaggaaaatgtgtcagattttaatgattttgatgactgtaataaagagcagtaaataaagtgagtagtcatgtcttttgttgaccaccctccagattggttggaatcgatcggcgacggctttcgtgaatttctcggccttgaggcgggtcccccgaaacccaaggccaatcaacagaagcaagataacgctcgaggtcttgtgcttcctgggtacaagtatcttggtcctgggaacggccttgataagggcgatcctgtcaattttgctgacgaggttgcccgagagcacgacctctcctaccagaaacagcttgaggcgggcgataacccttacctcaagtacaaccacgcggacgcagagtttcaggagaaactcgcttctgacacttcttttgggggaaaccttgggaaggctgttttccaggctaaaaagaggattctcgaacctcttggcctggttgagacgccggataaaacggcgcctgcggcaaaaaagaggcctctagagcagagtcctcaagagccagactcctcgagcggagttggcaagaaaggcaaacagcctgccagaaagagactcaactttgacgacgaacctggagccggagacgggcctcccccagaaggaccatcttccggagctatgtctactgagactgaaatgcgtgcagcagctggcggaaatggtggcgatgcgggacaaggtgccgagggagtgggtaatgcctccggtgattggcattgcgattccacttggtcagagagccacgtcaccaccacctcaacccgcacctgggtcctgccgacctacaacaaccacctgtacctgcggctcggctcgagcaacgccagcgacaccttcaacggattctccaccccctggggatactttgactttaaccgcttccactgccacttctcgccaagagactggcaaaggctcatcaacaaccactggggactgcgccccaaaagcatgcaagtccgcatcttcaacatccaagttaaggaggtcacgacgtctaacggggagacgaccgtatccaacaacctcaccagcacggtccagatctttgcggacagcacgtacgagctcccgtacgtgatggatgcaggtcaggagggcagcttgcctcctttccccaacgacgtgttcatggtgcctcagtacgggtactgcggactggtaaccggaggcagctctcaaaaccagacagacagaaatgccttctactgtctggagtactttcccagccagatgctgagaaccggaaacaactttgagatggtgtacaagtttgaaaacgtgcccttccactccatgtacgctcacagccagagcctggataggctgatgaacccgctgctggaccagtacctgtgggagctccagtctaccacctctggaggaactctcaaccagggcaattcagccaccaactttgccaagctgaccaaaacaaacttttctggctaccgcaaaaactggctcccggggcccatgatgaagcagcagagattctccaagactgccagtcaaaactacaagattccccagggaagaaacaacagtctgctccattatgagaccagaactaccctcgacggaagatggagcaattttgccccgggaacggccatggcaaccgcagccaacgacgccaccgacttctctcaggcccagctcatctttgcggggcccaacatcaccggcaacaccaccacagatgccaataacctgatgttcacttcagaagatgaacttagggccaccaacccccgggacactgacctgtttggccacctggcaaccaaccagcaaaacgccaccaccgttcctaccgtagacgacgtggacggagtcggcgtgtacccgggaatggtgtggcaggacagagacatttactaccaagggcccatttgggccaaaattccacacacggatggacactttcacccgtctcctctcattggcggatttggactgaaaagcccgcctccacaaatattcatcaaaaacactcctgtacccgccaatcccgcaacgaccttctctccggccagaatcaacagcttcatcacccagtacagcaccggacaggtggctgtcaaaatagaatgggaaatccagaaggagcggtccaagagatggaacccagaggtccagttcacgtccaactacggagcacaggactcgcttctctgggctcccgacaacgccggagcctacaaagagcccagggccattggatcccgatacctcaccaaccacctctagcccaattctgttgcataccctcaataaaccgtgtattcgtttcagtaaaatactgcctcttgtggtcattcggcgtacaacagcttacaacaacaacaaaacccccttgctagagagtgtggcactcccccccctgtcgcgttcgctcgttcgctggctcgattgggggggtggcagctcaaagagctgccagacgacggccctctgggccgtcgcccccccaatcgagccagcgaacgagcgaacgcgacaggggggggagtgccac

SEQ ID NO: 528 - protein, 390 aa, Bovine adeno-associated virus
MALVSWLVEHGITSEKQWIQENQESYLSFNSTGNSRSQIKAALDNASKIMSLTKSASDYLVGQTVPEDISENRIWQIFDLNGYDPAYAGSVLYGWCTRAFGKRNTVWLYGPATTGKTNIAEAISHTVPFYGCVNWTNENFPFNDCVEKMLIWWEEGKMTSKVVEPAKAILGGSRVRVDQKCKSSVQVDSTPVIITSNTNMCVVVDGNSTTFEHQQPLEDRMFRFELMRRLPPDFGKITKQEVKDFFAWAKVNQVPVTHEFMVPKKVAGTERAETSRKRPLDDVTNTNYKSPEKRARLSVVPETPRSSDVPVEPAPLRPLNWSSRYECRCDYHAKFDSVTGECDECEYLNRGKNGCIFHNATHCQICHAVPPWEKENVSDFNDFDDCNKEQ

SEQ ID NO: 529 - protein, 610 aa, Bovine adeno-associated virus
MATFYEVIVRVPFDVEEHLPGISDNFVDWVTGQIWELPPESDLNLTLIEQPQLTVADRIRRVFLYEWNKFSKQESKFFVQFEKGSEYFHLHTLVETSGISSMVLGRYVSQIRAQLVKVVFQNIEPRINDWVAITKVKKGGANKVVDSGYIPAYLLPKVQPELQWAWTNLEEYKLAALNLEERKRLVAQFQLESSQRSQEASSQRDVSADPVIKSKTSQKYMALVSWLVEHGITSEKQWIQENQESYLSFNSTGNSRSQIKAALDNASKIMSLTKSASDYLVGQTVPEDISENRIWQIFDLNGYDPAYAGSVLYGWCTRAFGKRNTVWLYGPATTGKTNIAEAISHTVPFYGCVNWTNENFPFNDCVEKMLIWWEEGKMTSKVVEPAKAILGGSRVRVDQKCKSSVQVDSTPVIITSNTNMCVVVDGNSTTFEHQQPLEDRMFRFELMRRLPPDFGKITKQEVKDFFAWAKVNQVPVTHEFMVPKKVAGTERAETSRKRPLDDVTNTNYKSPEKRARLSVVPETPRSSDVPVEPAPLRPLNWSSRYECRCDYHAKFDSVTGECDECEYLNRGKNGCIFHNATHCQICHAVPPWEKENVSDFNDFDDCNKEQ

SEQ ID NO: 530 - protein, 538 aa, Bovine adeno-associated virus
MRAAAGGNGGDAGQGAEGVGNASGDWHCDSTWSESHVTTTSTRTWVLPTYNNHLYLRLGSSNASDTFNGFSTPWGYFDFNRFHCHFSPRDWQRLINNHWGLRPKSMQVRIFNIQVKEVTTSNGETTVSNNLTSTVQIFADSTYELPYVMDAGQEGSLPPFPNDVFMVPQYGYCGLVTGGSSQNQTDRNAFYCLEYFPSQMLRTGNNFEMVYKFENVPFHSMYAHSQSLDRLMNPLLDQYLWELQSTTSGGTLNQGNSATNFAKLTKTNFSGYRKNWLPGPMMKQQRFSKTASQNYKIPQGRNNSLLHYETRTTLDGRWSNFAPGTAMATAANDATDFSQAQLIFAGPNITGNTTTDANNLMFTSEDELRATNPRDTDLFGHLATNQQNATTVPTVDDVDGVGVYPGMVWQDRDIYYQGPIWAKIPHTDGHFHPSPLIGGFGLKSPPPQIFIKNTPVPANPATTFSPARINSFITQYSTGQVAVKIEWEIQKERSKRWNPEVQFTSNYGAQDSLLWAPDNAGAYKEPRAIGSRYLTNHL

SEQ ID NO: 531 - protein, 736 aa, Artificial Sequence
  source: /note="Description of Artificial Sequence: Synthetic polypeptide"
MSFVDHPPDWLESIGDGFREFLGLEAGPPKPKANQQKQDNARGLVLPGYKYLGPGNGLDKGDPVNFADEVAREHDLSYQKQLEAGDNPYLKYNHADAEFQEKLASDTSFGGNLGKAVFQAKKRILEPLGLVETPDKTAPAAKKRPLEQSPQEPDSSSGVGKKGKQPARKRLNFDDEPGAGDGPPPEGPSSGAMSTETEMRAAAGGNGGDAGQGAEGVGNASGDWHCDSTWSESHVTTTSTRTWVLPTYNNHLYLRLGSSNASDTFNGFSTPWGYFDFNRFHCHFSPRDWQRLINNHWGLRPKSMQVRIFNIQVKEVTTSNGETTVSNNLTSTVHIFADSTYELPYVMDAGQEGSLPPFPNDVFMVPQYGYCGLVTGGSSQNQTDRNAFYCLEYFPSQMLRTGNNFEMVYKFENVPFHSMYAHSQSLDRLMNPLLDQYLWELQSTTSGGTLNQGNSATNFAKLTNKNFSGYRKNWLPGPMMKQQRFSKTASQNYKIPQGGNNSLLHYETRTTLDRRWSNFAPGTAMATAANDATDFSQAQLIFAGPNITGNTTTDANNLMFTSEDELRATNPRDTDLFGHLATNQQNATTVPTVDDVDGVGVYPGMVWQDRDIYYQGPIWAKIPHTDGHFHPSPLIGGFGLKSPPPQIFIKNTPVPANPATTFSPARINSFITQYSTGQVAVKIEWEIQKERSKRWNPEVQFTSNYGAQDSLLWAPDNAGAYKEPRAIGSRYLTNHL

SEQ ID NO: 532 - protein, 736 aa, Artificial Sequence
  source: /note="Description of Artificial Sequence: Synthetic polypeptide"
MSFVDHPPDWLESIGDGFREFLGLEAGPPKPKANQQKQDNARGLVLPGYKYLGPGNGLDKGDPVNFADEVAREHDLSYQKQLEAGDNPYLKYNHADAEFQEKLASDTSFGGNLGKAVFQAKKRILEPLGLVETPDKTAPAAKKRPLEQSPQEPDSSSGVGKKGKQPARKRLNFDDEPGAGDGPPPEGPSSGAMSTETEMRAAAGGNGGDAGQGAEGVGNASGDWHCDSTWSESHVTTTSTRTWVLPTYNNHLYLRLGSSNASDTFNGFSTPWGYFDFNRFHCHFSPRDWQRLINNHWGLRPKSMQVRIFNIQVKEVTTSNGETTVSNNLTSTVQIFADSTYELPYVMDAGQEGSLPPFPNDVFMVPQYGYCGLVTGGSSQNQTDRNAFYCLEYFPSQMLRTGNNFEMVYKFENVPFHSMYAHSQSLDRLMNPLLDQYLWELQSTTSGGTLNQGNSATNFAKLTKTNFSGYRKNWLPGPMMKQQRFSKTASQNYKIPQGRNNSLLHYETRTTLDGRWSNFAPGTAMATAANDATDFSQAQLIFAGPNITGNTTTDANNLMFTSEDELRATNPRDTDLFGHLATNQQNATTVPTVDDVDGVGVYPGMVWQDRDIYYQGPIWAKIPHTDGHFHPSPLIGGFGLKSPPPQIFIKNTPVPANPATTFSPARINSFITQYSTGQVAVKIEWEIQKERSKRWNPEVQFTSNYGAQDSLLWAPDNAGAYKEPRAIGSRYLTNHL

SEQ ID NO: 533 - protein, 736 aa, Bovine adeno-associated virus; identical to SEQ ID NO: 532

SEQ ID NO: 534 - protein, 600 aa, Bovine adeno-associated virus
TAPAAKKRPLEQSPQEPDSSSGVGKKGKQPARKRLNFDDEPGAGDGPPPEGPSSGAMSTETEMRAAAGGNGGDAGQGAEGVGNASGDWHCDSTWSESHVTTTSTRTWVLPTYNNHLYLRLGSSNASDTFNGFSTPWGYFDFNRFHCHFSPRDWQRLINNHWGLRPKSMQVRIFNIQVKEVTTSNGETTVSNNLTSTVQIFADSTYELPYVMDAGQEGSLPPFPNDVFMVPQYGYCGLVTGGSSQNQTDRNAFYCLEYFPSQMLRTGNNFEMVYKFENVPFHSMYAHSQSLDRLMNPLLDQYLWELQSTTSGGTLNQGNSATNFAKLTKTNFSGYRKNWLPGPMMKQQRFSKTASQNYKIPQGRNNSLLHYETRTTLDGRWSNFAPGTAMATAANDATDFSQAQLIFAGPNITGNTTTDANNLMFTSEDELRATNPRDTDLFGHLATNQQNATTVPTVDDVDGVGVYPGMVWQDRDIYYQGPIWAKIPHTDGHFHPSPLIGGFGLKSPPPQIFIKNTPVPANPATTFSPARINSFITQYSTGQVAVKIEWEIQKERSKRWNPEVQFTSNYGAQDSLLWAPDNAGAYKEPRAIGSRYLTNHL

SEQ ID NO: 535 - DNA, 2214 bp, Artificial Sequence
  source: /note="Description of Artificial Sequence: Synthetic polynucleotide"
atggctgccgatggttatcttccagattggctcgaggacactctctctgaaggaataagacagtggtggaagctcaaacctggcccaccaccaccaaagcccgcagagcggcataaggacgacagcaggggtcttgtgcttcctgggtacaagtacctcggacccttcaacggactcgacaagggagagccggtcaacgaggcagacgccgcggccctcgagcacgacaaagcctacgaccggcagctcgacagcggagacaacccgtacctcaagtacaaccacgccgacgcggagtttcaggagcgccttaaagaagatacgtcttttgggggcaacctcgggcgagcagtcttccaggccaaaaagaggcttcttgaacctcttggtctggttgaggaagcggctaagacggctcctggaaagaagaggcctgtagagcagtctcctcaggaaccggactcctcctcgggcatcggcaagacaggccagcagcccgctaaaaagagactcaatttcggtcagactggcgacacagagtcagtcccagaccctcaaccaatcggagaacctcccgcagccccctcaggtgtgggatctcttacaatggcttcaggtggtggcgcaccagtggcagacaataacgaaggtgccgatggagtgggtagttcctcgggaaattggcattgcgattcccaatggctgggggacagagtcatcaccaccagcacccgaacctgggccctgcccacctacaacaatcacctctacaagcaaatctccaacgggacatcgggaggagccaccaacgacaacacctacttcggctacagcaccccctgggggtattttgactttaacagattccactgccacttttcaccacgtgactggcagcgactcatcaacaacaactggggattccggcccaagagactcagcttcaagctcttcaacatccaggtcaaggaggtcacgcagaatgaaggcaccaagaccatcgccaataaccttaccagcacggtccaggtcttcacggactcggagtaccagctgccgtacgttctcggctctgcccaccagggctgcctgcctccgttcccggcggacgtgttcatgattccccagtacggctacctaacactcaacaacggtagtcaggccgtgggacgctcctccttctactgcctggaatactttccttcgcagatgctgagaaccggcaacaacttccagtttacttacaccttcgaggacgtgcctttccacagcagctacgcccacagccagagcttggaccggctgatgaatcctctgattgaccagtacctgtactacttgtctcggactcaaacaacaggaggcacggcaaatacgcagactctgggcttcagccaaggtgggcctaatacaatggccaatcaggcaaagaactggctgccaggaccctgttaccgccaacaacgcgtctcaacgacaaccgggcaaaacaacaatagcaactttgcctggactgctgggaccaaataccatctgaatggaagaaattcattggctaatcctggcatcgctatggcaacacacaaagacgacaaggagcgtttttttcccagtaacgggatcctgatttttggcaaacaaaatgctgccagagacaatgcggattacagcgatgtcatgctcaccagcgaggaagaaatcaaaaccactaaccctgtggctacagaggaatacggtatcgtggcagataacttgcagcagcaaaacacggctcctcaaattggaactgtcaacagccagggggccttacccggtatggtttggcagaaccgggacgtgtacctgcagggtcccatctgggccaagattcctcacacggacggcaacttccacccgtctccgctgatgggcggctttggcctgaaacatcctccgcctcagatcctgatcaagaacacgcctgtacctgcggatcctccgaccaccttcaaccagtcaaagctgaactctttcatcacgcaatacagcaccggacaggtcagcgtggaaattgaatgggagctgcagaaggaaaacagcaagcgctggaaccccgagatccagtacacctccaactactacaaatctacaagtgtggactttgctgttaatacagaaggcgtgtactctgaaccccaccccattggcacccgttacctcacccgtcccctgtaa

SEQ ID NO: 536 - protein, 737 aa, Artificial Sequence
  source: /note="Description of Artificial Sequence: Synthetic polypeptide"
MAADGYLPDWLEDTLSEGIRQWWKLKPGPPPPKPAERHKDDSRGLVLPGYKYLGPFNGLDKGEPVNEADAAALEHDKAYDRQLDSGDNPYLKYNHADAEFQERLKEDTSFGGNLGRAVFQAKKRLLEPLGLVEEAAKTAPGKKRPVEQSPQEPDSSSGIGKTGQQPAKKRLNFGQTGDTESVPDPQPIGEPPAAPSGVGSLTMASGGGAPVADNNEGADGVGSSSGNWHCDSQWLGDRVITTSTRTWALPTYNNHLYKQISNGTSGGATNDNTYFGYSTPWGYFDFNRFHCHFSPRDWQRLINNNWGFRPKRLSFKLFNIQVKEVTQNEGTKTIANNLTSTVQVFTDSEYQLPYVLGSAHQGCLPPFPADVFMIPQYGYLTLNNGSQAVGRSSFYCLEYFPSQMLRTGNNFQFTYTFEDVPFHSSYAHSQSLDRLMNPLIDQYLYYLSRTQTTGGTANTQTLGFSQGGPNTMANQAKNWLPGPCYRQQRVSTTTGQNNNSNFAWTAGTKYHLNGRNSLANPGIAMATHKDDKERFFPSNGILIFGKQNAARDNADYSDVMLTSEEEIKTTNPVATEEYGIVADNLQQQNTAPQIGTVNSQGALPGMVWQNRDVYLQGPIWAKIPHTDGNFHPSPLMGGFGLKHPPPQILIKNTPVPADPPTTFNQSKLNSFITQYSTGQVSVEIEWELQKENSKRWNPEIQYTSNYYKSTSVDFAVNTEGVYSEPHPIGTRYLTRPL

SEQ ID NO: 537 - protein, 736 aa, Artificial Sequence
  source: /note="Description of Artificial Sequence: Synthetic polypeptide"
MAADGYLPDWLEDNLSEGIREWWDLKPGAPKPKANQQKQDDGRGLVLPGYKYLGPFNGLDKGEPVNAADAAALEHDKAYDQQLKAGDNPYLRYNHADAEFQERLQEDTSFGGNLGRAVFQAKKRVLEPLGLVEEGAKTAPGKKRPVEQSPQEPDSSSGIGKTGQQPAKKRLNFGQTGDTESVPDPQPIGEPPAAPSGVGSLTMASGGGAPVADNNEGADGVGSSSGNWHCDSQWLGDRVITTSTRTWALPTYNNHLYKQISSASTGASNDNHYFGYSTPWGYFDFNRFHCHFSPRDWQRLINNNWGFRPKRLNFKLFNIQVKEVTDNNGVKTIANNLTSTVQVFTDSDYQLPYVLGSAHQGCLPPFPADVFMIPQYGYLTLNNGSQAVGRSSFYCLEYFPSQMLRTGNNFQFTYTFEDVPFHSSYAHSQSLDRLMNPLIDQYLYYLSRTQTTGGTANTQTLGFSQGGPNTMANQAKNWLPGPCYRQQRVSTTTGQNNNSNFAWTAGTKYHLNGRNSLANPGIAMATHKDDKERFFPSNGILIFGKQNAARDNADYSDVMLTSEEEIKTTNPVATEEYGIVADNLQQQNTAPQIGTVNSQGALPGMVWQNRDVYLQGPIWAKIPHTDGNFHPSPLMGGFGLKHPPPQILIKNTPVPADPPTTFNQSKLNSFITQYSTGQVSVEIEWELQKENSKRWNPEIQYTSNYYKSTSVDFAVNTEGVYSEPHPIGTRYLTRPL

SEQ ID NO: 538 - protein, 736 aa, Artificial Sequence
  source: /note="Description of Artificial Sequence: Synthetic polypeptide"
MAADGYLPDWLEDTLSEGIRQWWKLKPGPPPPKPAERHKDDSRGLVLPGYKYLGPFNGLDKGEPVNEADAAALEHDKAYDRQLDSGDNPYLKYNHADAEFQERLQGDTSFGGNLGRAVFQAKKRVLEPLGLVEEGAKTAPGKKRPVEQSPQEPDSSSGIGETGQQPAKKRLNFGQTGDSESVPDPQPLGEPPATPAAVGPTTMASGGGAPMADNNEGADGVGSSSGNWHCDSQWLGDRVITTSTRTWALPTYNNHLYKQISSASTGASNDNHYFGYSTPWGYFDFNRFHCHFSPRDWQRLINNNWGFRPKRLSFKLFNIQVKEVTDNNGVKTIANNLTSTVQVFTDSEYQLPYVLGSAHQGCLPPFPADVFMIPQYGYLTLNNGSQAVGRSSFYCLEYFPSQMLRTGNNFTFSYTFEDVPFHSSYAHSQSLDRLMNPLIDQYLYYLSRTQTTGGTANTQTLGFSQGGPNTMANQAKNWLPGPCYRQQRVSTTTGQNNNSNFAWTAGTKYHLNGRNSLANPGIAMATHKDDKERFFPSNGILIFGKQNAARDNADYSDVMLTSEEEIKTTNPVATEEYGIVADNLQQQNTAPQIGTVNSQGALPGMVWQNRDVYLQGPIWAKIPHTDGNFHPSPLMGGFGLKHPPPQILIKNTPVPADPPTTFNQSKLNSFITQYSTGQVSVEIEWELQKENSKRWNPEIQYTSNYYKSTSVDFAVNTEGVYSEPHPIGTRYLTRPL

SEQ ID NO: 539 - DNA, 2181 bp, Artificial Sequence
  source: /note="Description of Artificial Sequence: Synthetic polynucleotide"
atgtcttttgttgatcaccctccagattggttggaagaagttggtgaaggtcttcgcgagtttttgggccttgaagcgggcccaccgaaaccaaaacccaatcagcagcatcaagatcaagcccgtggtcttgtgctgcctggttataactatctcggacccggaaacggtctcgatcgaggagagcctgtcaacagggcagacgaggtcgcgcgagagcacgacatctcgtacaacgagcagcttgaggcgggagacaacccctacctcaagtacaaccacgcggacgccgagtttcaggagaagctcgccgacgacacatccttcgggggaaacctcggaaaggcagtctttcaggccaagaaaagggttctcgaaccttttggcctggttgaagagggtgctaagacggcccctaccggaaagcggatagacgaccactttccaaaaagaaagaaggctcggaccgaagaggactccaagccttccacctcgtcagacgccgaagctggacccagcggatcccagcagctgcaaatcccagcacaaccagcctcaagtttgggagctgatacaatgtctgcgggaggtggcggcccattgggcgacaataaccaaggtgccgatggagtgggcaatgcctcgggagattggcattgcgattccacgtggatgggggacagagtcgtcaccaagtccacccgcacctgggtgctgcccagctacaacaaccaccagtaccgagagatcaaaagcggctccgtcgacggaagcaacgccaacgcctactttggatacagcaccccctgggggtactttgactttaaccgcttccacagccactggagcccccgagactggcaaagactcatcaacaactattggggcttcagaccccggtctctcagagtcaaaatcttcaacatccaagtcaaagaggtcacggtgcaggactccaccaccaccatcgccaacaacctcacctccaccgtccaagtgtttacggacgacgactaccaactcccgtacgtcgtcggcaacgggaccgagggatgcctgccggccttccccccgcaggtctttacgctgccgcagtacggctacgcgacgctgaaccgagacaacggagacaacccgacagagcggagcagcttcttttgcctagagtactttcccagcaagatgctgaggacgggcaacaactttgagtttacctacagctttgaagaggtgcccttccactgcagcttcgccccgagccagaacctctttaagctggccaacccgctggtggaccagtacctgtaccgcttcgtgagcacctcggccacgggcgccatccagttccaaaagaacctggcgggcagatacgccaacacctacaaaaactggttcccggggcccatgggccgaacccagggctggaacacgagctctggggtcagcagcaccaacagagtcagcgtcaacaacttttccgtctcaaaccggatgaacctggagggggccagctaccaagtgaacccccagcccaacgggatgacaaacacgctccaaggcagcaaccgctacgcgctggaaaacaccatgatcttcaacgctcaaaacgccacgccgggaactacctcggtgtacccagaggacaatctactgctgaccagcgagagcgagactcagcccgtcaaccgggtggcttacaacacgggcggtcagatggccaccaacgcccagaacgccaccacggctcccacggtcgggacctacaacctccaggaagtgcttcctggcagcgtatggatggagagggacgtgtacctccaaggacccatctgggccaagatcccagagacgggggcgcactttcacccctctccggccatgggcggattcggactcaaacacccgccgcccatgatgctcatcaaaaacacgccggtgcccggcaacatcaccagcttctcggacgtgcccgtcagcagcttcatcacccagtacagcaccgggcaggtcaccgtggagatggaatgggagctcaaaaaggaaaactccaagaggtggaacccagagatccagtacaccaacaactacaacgacccccagtttgtggactttgctccagacggctccggcgaatacagaaccaccagagccatcggaacccgatacctcacccgacccctt

SEQ ID NO: 540 - protein, 726 aa, Artificial Sequence
  source: /note="Description of Artificial Sequence: Synthetic polypeptide"
MSFVDHPPDWLEEVGEGLREFLGLEAGPPKPKPNQQHQDQARGLVLPGYNYLGPGNGLDRGEPVNRADEVAREHDISYNEQLEAGDNPYLKYNHADAEFQEKLADDTSFGGNLGKAVFQAKKRVLEPFGLVEEGAKTAPTGKRIDDHFPKRKKARTEEDSKPSTSSDAEAGPSGSQQLQIPAQPASSLGADTMSAGGGGPLGDNNQGADGVGNASGDWHCDSTWMGDRVVTKSTRTWVLPSYNNHQYREIKSGSVDGSNANAYFGYSTPWGYFDFNRFHSHWSPRDWQRLINNYWGFRPRSLRVKIFNIQVKEVTVQDSTTTIANNLTSTVQVFTDDDYQLPYVVGNGTEGCLPAFPPQVFTLPQYGYATLNRDNGDNPTERSSFFCLEYFPSKMLRTGNNFEFTYSFEEVPFHCSFAPSQNLFKLANPLVDQYLYRFVSTSATGAIQFQKNLAGRYANTYKNWFPGPMGRTQGWNTSSGSSTNRVSVNNFSVSNRMNLEGASYQVNPQPNGMTNTLQGSNRYALENTMIFNAQNATPGTTSVYPEDNLLLTSESETQPVNRVAYNTGGQMATNAQNATTAPTVGTYNLQEVLPGSVWMERDVYLQGPIWAKIPETGAHFHPSPAMGGFGLKHPPPMMLIKNTPVPGNITSFSDVPVSSFITQYSTGQVTVEMEWELKKENSKRWNPEIQYTNNYNDPQFVDFAPDGSGEYRTTRAIGTRYLTRPL

SEQ ID NO: 541 - protein, 735 aa, Artificial Sequence
  source: /note="Description of Artificial Sequence: Synthetic polypeptide"
MAADGYLPDWLEDTLSEGIRQWWKLKPGPPPPKPAERHKDDSRGLVLPGYKYLGPFNGLDKGEPVNEADAAALEHDKAYDRQLDSGDNPYLKYNHADAEFQERLKEDTSFGGNLGRAVFQAKKRILEPLGLVEEPVKTAPGKKRPVEHSPAEPDSSSGTGKSGQQPARKRLNFGQTGDADSVPDPQPLGQPPAAPSGLGTNTMASGSGAPMADNNEGADGVGNSSGNWHCDSTWMGDRVITTSTRTWALPTYNNHLYKQISSQSGASNDNHYFGYSTPWGYFDFNRFHCHFSPRDWQRLINNNWGFRPKRLSFKLFNIQVKEVTQNDGTTTIANNLTSTVQVFTDSEYQLPYVLGSAHQGCLPPFPADVFMVPQYGYLTLNNGSQAVGRSSFYCLEYFPSQMLRTGNNFTFSYTFEDVPFHSSYAHSQSLDRLMNPLIDQYLYYLSRTNTPSGTTTMSRLQFSQAGASDIRDQSRNWLPGPCYRQQRVSKTAADNNNSDYSWTGATKYHLNGRDSLVNPGPAMASHKDDEEKYFPQSGVLIFGKQDSGKTNVDIEKVMITDEEEIRTTNPVATEQYGSVSTNLQSGNTQAATSDVNTQGVLPGMVWQDRDVYLQGPIWAKIPHTDGHFHPSPLMGGFGLKHPPPQILIKNTPVPANPSTTFSAAKFASFITQYSTGQVSVEIEWELQKENSKRWNPEIQYTSNYNKSVNVDFTVDTNGVYSEPRPIGTRYLTRNL

SEQ ID NO: 542 - DNA, 1797 bp, Artificial Sequence
  source: /note="Description of Artificial Sequence: Synthetic polynucleotide"
acggctccgaccggagacaagcggaaaggcgaagacgaacctcgtttgcccgacacttcttcacagactcccaagaaaaacaagaagcctcgcaaggaaagaccttccggcggggcagaagatccgggcgaaggcacctcttccaacgctggagcagcagcacccgcctctagtgtgggatcatctatcatggctgaaggaggtggcggcccagtgggcgatgcaggccagggtgccgatggagtgggcaattcctccggaaattggcattgcgattcccaatggctggaaaacggagtcgtcactcgaaccacccgaacctgggtcttgcccagctacaacaaccacctgtacaaacgaatccaaggacccagcggaggcgacaacaacaacaaattctttggattcagcaccccctggggatactttgactacaatcgattccactgccacttttccccgcgagactggcaacgactcatcaacaacaactggggcatccgtcccaaagcgatgcgctttagactctttaacatccaggttaaagaggtcacggtccaagacttcaacaccaccatcggcaacaacctcaccagtacggtccaggtctttgcggacaaggactaccaactgccgtacgtcctcggatcggctaccgaaggcaccttcccgccgttcccagcggatatctacacgatcccgcagtacgggtactgcacgctaaactacaacaacgaggcggtggatcgttcggccttctactgtctggactactttccctcagacatgctgcggacaggaaataactttgagtttacttacaccttcgaggacgttcctttccatagcatgtttgcccacaaccagacgctagaccggctgatgaatcccctcgtggatcagtacctctgggctttcagctccgtcagccaagcaggctcatctggacgagctcttcattactcgcgggcgactaaaaccaacatggcggctcaatataggaactggttacctgggcctttcttccgtgatcagcaaatctttacgggcgctagcaacatcactaaaaataacgtctttagcgtttgggaaaaaggcaagcaatgggaactcgacaatcggaccaacctaatgcagcccggtcctgcggcagcgaccacctttagcggagaacctgaccgtcaagccatgcaaaacacgctggcttttagcaggaccgtctacgatcaaacgaccgccacgaccgatcgtaaccagatactcatcaccaacgaagacgaaatcagacccaccaactcggtcggtatcgacgcgtggggagcagttcccaccaacaaccagtcgatcgtgacccccggcactcgcgcggccgtcaacaatcaaggggcgcttcccgggatggtgtggcaaaacagagacatttaccctacagggacccatttggccaaaattcccgacactgacaatcacttccatccgtccccgcttattgggcggtttggctgcaagcatccccctccccagattttcattaaaaacacacccgtccctgccaacccttcggaaacgttccagacggccaaagtggcctccttcatcaaccagtactcgaccggacagtgcaccgtcgaaatcttttgggaactcaagaaggaaacctccaagcgctggaaccccgaaatccagttcacctccaactttggcaacgcggccgacatccagtttgccgtctccgacacgggatcctattccgaacctcgtcccatcggtacccgttaccttaccaaacctctgtaa

SEQ ID NO: 543 - DNA, 1989 bp, Artificial Sequence
  source: /note="Description of Artificial Sequence: Synthetic polynucleotide"
atgaggtcgtactacgaggtcatcgttcagctgcccaacgacgtcgagagtcaggtacctggaatctccgattcgttcgtcaactggattacgtcgcgagaatggacgttgcctgaggacgccgattgggatttggaccaggtcgatcaagttcaactgacgctcggcgacaaaatccaacgggagattcgaactcattgggggacgatggccaaagaaccggactttcactattttatccaactggaacaaggtgaggtgttctttcatttacacgtcctgctggaaacgtgttccgtaaagccgatggtactcggaagatatatccgacatattcaacaaaaaattgtgagtaaagtctactgcgccacgagcctacgatggaaggatggatgcgtggtgaccaagaccaaaaatttcgggggcgcgaacaaggtccgggccgagtcgtatattcccgcctacctgatcccgaaacagcaaccggaagtgcagtgggcgtggactaacgtgcccgagtatataaaagcgtgcttgcaccgagaactgcgtgccagtctcgcgcgacttcacttcgaggaggcgggcgtctcgcaatccaaggaaaatctcgcgagaactgcagacggcgctcccgtgatgccgacccgcgtcagcaaacgctacatggagctcgtggattggctcgtggagaaggggatcaccaccgagaaggaatggctgctggaaaacagagaaagctttcggagctttcaggcctcgagcaactcggcgcgtcagatcaagacggccctgcaaggcgccattcaggagatgcttctgaccaagacggcggaggactacctcgtcggaaaggatcccgtctcggacgacgacatccgtcagaaccgcatctacaagattctggaactgaaccactacgacccagcgtacgtggggagtattttggtcgggtggtgccagaagaaatggggcaagcgaaacacgctgtggctgttcggacatgcgaccaccggcaagaccaacatcgcggaggctattgcccatgctgtgccgttctatggatgcgttaactggaccaacgagaactttccgttcaacgactgcgtcgaaaaaatgattatctggtgggaggagggcaaaatgaccgccaaagtggtggaaacagccaaggcgattctgggaggatctcgggtgagagtggaccaaaaatgcaaagcttcggttccgatcgaaccgacgccggtcattattaccagtaacaccaacatgtgttatgtcatcgacgggaacacgaccacgttcgagcataagcagccgttggaggacaggatgtttaagctcgaattgctgactcggttgcctgatgactttggtaaggtgaccaaacaggaggtgcgtcaattcttcaggtggtctcaggatcacctgacccctgtgatcccagaattcctagtgcggaaggcggagtctcgcaaaagacccgccccttccggggaaggctatataagcccgacaaagcggcccgcgctcgcagagcagcagcaggcgtcggagagcgcggacccggttcccaccaggtatcgtatcaaatgctcgaaacattgcggtatggataaaatgttgtttccttgccaaatttgtgaatcgatgaacagagatattaatatttgtgctattcataaaacgaccgactgtaaagagtgtttccccgactacggggataaagatgatgtagaactacccccctgtacagaacacaacgtgtctcgttgttatcaatgtcattcgggcgaattgtatcgcgtgacttcggactctgacgagaaacctgcccccgagagtgatgaaggcaccgagccatcctatgctccctgcacgattcaccacctgatgggcaagagtcacgggttagtcacttgcgcggcgtgtcggttgaaaaatagtacgttgcatgatgacttggatgacggtgatctcgaacaataa

SEQ ID NO: 544 - DNA, 1626 bp, Artificial Sequence
  source: /note="Description of Artificial Sequence: Synthetic polynucleotide"
atgaggtcgtactacgaggtcatcgttcagctgcccaacgacgtcgagagtcaggtacctggaatctccgattcgttcgtcaactggattacgtcgcgagaatggacgttgcctgaggacgccgattgggatttggaccaggtcgatcaagttcaactgacgctcggcgacaaaatccaacgggagattcgaactcattgggggacgatggccaaagaaccggactttcactattttatccaactggaacaaggtgaggtgttctttcatttacacgtcctgctggaaacgtgttccgtaaagccgatggtactcggaagatatatccgacatattcaacaaaaaattgtgagtaaagtctactgcgccacgagcctacgatggaaggatggatgcgtggtgaccaagaccaaaaatttcgggggcgcgaacaaggtccgggccgagtcgtatattcccgcctacctgatcccgaaacagcaaccggaagtgcagtgggcgtggactaacgtgcccgagtatataaaagcgtgcttgcaccgagaactgcgtgccagtctcgcgcgacttcacttcgaggaggcgggcgtctcgcaatccaaggaaaatctcgcgagaactgcagacggcgctcccgtgatgccgacccgcgtcagcaaacgctacatggagctcgtggattggctcgtggagaaggggatcaccaccgagaaggaatggctgctggaaaacagagaaagctttcggagctttcaggcctcgagcaactcggcgcgtcagatcaagacggccctgcaaggcgccattcaggagatgcttctgaccaagacggcggaggactacctcgtcggaaaggatcccgtctcggacgacgacatccgtcagaaccgcatctacaagattctggaactgaaccactacgacccagcgtacgtggggagtattttggtcgggtggtgccagaagaaatggggcaagcgaaacacgctgtggctgttcggacatgcgaccaccggcaagaccaacatcgcggaggctattgcccatgctgtgccgttctatggatgcgttaactggaccaacgagaactttccgttcaacgactgcgtcgaaaaaatgattatctggtgggaggagggcaaaatgaccgccaaagtggtggaaacagccaaggcgattctgggaggatctcgggtgagagtggaccaaaaatgcaaagcttcggttccgatcgaaccgacgccggtcattattaccagtaacaccaacatgtgttatgtcatcgacgggaacacgaccacgttcgagcataagcagccgttggaggacaggatgtttaagctcgaattgctgactcggttgcctgatgactttggtaaggtgaccaaacaggaggtgcgtcaattcttcaggtggtctcaggatcacctgacccctgtgatcccagaattcctagtgcggaaggcggagtctcgcaaaagacccgccccttccggggaaggctatataagcccgacaaagcggcccgcgctcgcagagcagcagcaggcgtcggagagcgcggacccggttcccaccagattggttggagcggttggtcaaaaagggagtgaatgctgcagctga

SEQ ID NO: 545 - DNA, 1323 bp, Artificial Sequence
  source: /note="Description of Artificial Sequence: Synthetic polynucleotide"
atggagctcgtggattggctcgtggagaaggggatcaccaccgagaaggaatggctgctggaaaacagagaaagctttcggagctttcaggcctcgagcaactcggcgcgtcagatcaagacggccctgcaaggcgccattcaggagatgcttctgaccaagacggcggaggactacctcgtcggaaaggatcccgtctcggacgacgacatccgtcagaaccgcatctacaagattctggaactgaaccactacgacccagcgtacgtggggagtattttggtcgggtggtgccagaagaaatggggcaagcgaaacacgctgtggctgttcggacatgcgaccaccggcaagaccaacatcgcggaggctattgcccatgctgtgccgttctatggatgcgttaactggaccaacgagaactttccgttcaacgactgcgtcgaaaaaatgattatctggtgggaggagggcaaaatgaccgccaaagtggtggaaacagccaaggcgattctgggaggatctcgggtgagagtggaccaaaaatgcaaagcttcggttccgatcgaaccgacgccggtcattattaccagtaacaccaacatgtgttatgtcatcgacgggaacacgaccacgttcgagcataagcagccgttggaggacaggatgtttaagctcgaattgctgactcggttgcctgatgactttggtaaggtgaccaaacaggaggtgcgtcaattcttcaggtggtctcaggatcacctgacccctgtgatcccagaattcctagtgcggaaggcggagtctcgcaaaagacccgccccttccggggaaggctatataagcccgacaaagcggcccgcgctcgcagagcagcagcaggcgtcggagagcgcggacccggttcccaccaggtatcgtatcaaatgctcgaaacattgcggtatggataaaatgttgtttccttgccaaatttgtgaatcgatgaacagagatattaatatttgtgctattcataaaacgaccgactgtaaagagtgtttccccgactacggggataaagatgatgtagaactacccccctgtacagaacacaacgtgtctcgttgttatcaatgtcattcgggcgaattgtatcgcgtgacttcggactctgacgagaaacctgcccccgagagtgatgaaggcaccgagccatcctatgctccctgcacgattcaccacctgatgggcaagagtcacgggttagtcacttgcgcggcgtgtcggttgaaaaatagtacgttgcatgatgacttggatgacggtgatctcgaacaataa

SEQ ID NO: 546 - DNA, 960 bp, Artificial Sequence
  source: /note="Description of Artificial Sequence: Synthetic polynucleotide"
atggagctcgtggattggctcgtggagaaggggatcaccaccgagaaggaatggctgctggaaaacagagaaagctttcggagctttcaggcctcgagcaactcggcgcgtcagatcaagacggccctgcaaggcgccattcaggagatgcttctgaccaagacggcggaggactacctcgtcggaaaggatcccgtctcggacgacgacatccgtcagaaccgcatctacaagattctggaactgaaccactacgacccagcgtacgtggggagtattttggtcgggtggtgccagaagaaatggggcaagcgaaacacgctgtggctgttcggacatgcgaccaccggcaagaccaacatcgcggaggctattgcccatgctgtgccgttctatggatgcgttaactggaccaacgagaactttccgttcaacgactgcgtcgaaaaaatgattatctggtgggaggagggcaaaatgaccgccaaagtggtggaaacagccaaggcgattctgggaggatctcgggtgagagtggaccaaaaatgcaaagcttcggttccgatcgaaccgacgccggtcattattaccagtaacaccaacatgtgttatgtcatcgacgggaacacgaccacgttcgagcataagcagccgttggaggacaggatgtttaagctcgaattgctgactcggttgcctgatgactttggtaaggtgaccaaacaggaggtgcgtcaattcttcaggtggtctcaggatcacctgacccctgtgatcccagaattcctagtgcggaaggcggagtctcgcaaaagacccgccccttccggggaaggctatataagcccgacaaagcggcccgcgctcgcagagcagcagcaggcgtcggagagcgcggacccggttcccaccagattggttggagcggttggtcaaaaagggagtgaatgctgcagctga

SEQ ID NO: 547 - DNA, 1608 bp, Artificial Sequence
  source: /note="Description of Artificial Sequence: Synthetic polynucleotide"
atggctgaaggaggtggcggcccagtgggcgatgcaggccagggtgccgatggagtgggcaattcctccggaaattggcattgcgattcccaatggctggaaaacggagtcgtcactcgaaccacccgaacctgggtcttgcccagctacaacaaccacctgtacaaacgaatccaaggacccagcggaggcgacaacaacaacaaattctttggattcagcaccccctggggatactttgactacaatcgattccactgccacttttccccgcgagactggcaacgactcatcaacaacaactggggcatccgtcccaaagcgatgcgctttagactctttaacatccaggttaaagaggtcacggtccaagacttcaacaccaccatcggcaacaacctcaccagtacggtccaggtctttgcggacaaggactaccaactgccgtacgtcctcggatcggctaccgaaggcaccttcccgccgttcccagcggatatctacacgatcccgcagtacgggtactgcacgctaaactacaacaacgaggcggtggatcgttcggccttctactgtctggactactttccctcagacatgctgcggacaggaaataactttgagtttacttacaccttcgaggacgttcctttccatagcatgtttgcccacaaccagacgctagaccggctgatgaatcccctcgtggatcagtacctctgggctttcagctccgtcagccaagcaggctcatctggacgagctcttcattactcgcgggcgactaaaaccaacatggcggctcaatataggaactggttacctgggcctttcttccgtgatcagcaaatctttacgggcgctagcaacatcactaaaaataacgtctttagcgtttgggaaaaaggcaagcaatgggaactcgacaatcggaccaacctaatgcagcccggtcctgcggcagcgaccacctttagcggagaacctgaccgtcaagccatgcaaaacacgctggcttttagcaggaccgtctacgatcaaacgaccgccacgaccgatcgtaaccagatactcatcaccaacgaagacgaaatcagacccaccaactcggtcggtatcgacgcgtggggagcagttcccaccaacaaccagtcgatcgtgacccccggcactcgcgcggccgtcaacaatcaaggggcgcttcccgggatggtgtggcaaaacagagacatttaccctacagggacccatttggccaaaattcccgacactgacaatcacttccatccgtccccgcttattgggcggtttggctgcaagcatccccctccccagattttcattaaaaacacacccgtccctgccaacccttcggaaacgttccagacggccaaagtggcctccttcatcaaccagtactcgaccggacagtgcaccgtcgaaatcttttgggaactcaagaaggaaacctccaagcgctggaaccccgaaatccagttcacctccaactttggcaacgcggccgacatccagtttgccgtctccgacacgggatcctattccgaacctcgtcccatcggtacccgttaccttaccaaacctctgtaa

SEQ ID NO: 548 - DNA, 2232 bp, Artificial Sequence
  source: /note="Description of Artificial Sequence: Synthetic polynucleotide"
atgtctctcatttctgatgcgattccagattggttggagcggttggtcaaaaagggagtgaatgctgcagctgatttctaccatttggaaagcggtcctcctcgtcctaaggcaaatcagcaaactcaagaatctcttgaaaaggacgattcgagaggtctcgtgttcccaggctacaattatctaggccctttcaacggtctagataaaggagaacccgtcaacgaggcagacgctgccgccttagaacacgacaaggcttacgacctcgaaatcaaggacgggcacaacccgtactttgagtacaacgaggccgacagacgtttccaggaacgtctcaaagacgatacctcctttggaggcaatttaggtaaagccatcttccaggccaaaaagagggttctcgaaccctttggtctggtggaagactcaaagacggctccgaccggagacaagcggaaaggcgaagacgaacctcgtttgcccgacacttcttcacagactcccaagaaaaacaagaagcctcgcaaggaaagaccttccggcggggcagaagatccgggcgaaggcacctcttccaacgctggagcagcagcacccgcctctagtgtgggatcatctatcatggctgaaggaggtggcggcccagtgggcgatgcaggccagggtgccgatggagtgggcaattcctccggaaattggcattgcgattcccaatggctggaaaacggagtcgtcactcgaaccacccgaacctgggtcttgcccagctacaacaaccacctgtacaaacgaatccaaggacccagcggaggcgacaacaacaacaaattctttggattcagcaccccctggggatactttgactacaatcgattccactgccacttttccccgcgagactggcaacgactcatcaacaacaactggggcatccgtcccaaagcgatgcgctttagactctttaacatccaggttaaagaggtcacggtccaagacttcaacaccaccatcggcaacaacctcaccagtacggtccaggtctttgcggacaaggactaccaactgccgtacgtcctcggatcggctaccgaaggcaccttcccgccgttcccagcggatatctacacgatcccgcagtacgggtactgcacgctaaactacaacaacgaggcggtggatcgttcggccttctactgtctggactactttccctcagacatgctgcggacaggaaataactttgagtttacttacaccttcgaggacgttcctttccatagcatgtttgcccacaaccagacgctagaccggctgatgaatcccctcgtggatcagtacctctgggctttcagctccgtcagccaagcaggctcatctggacgagctcttcattactcgcgggcgactaaaaccaacatggcggctcaatataggaactggttacctgggcctttcttccgtgatcagcaaatctttacgggcgctagcaacatcactaaaaataacgtctttagcgtttgggaaaaaggcaagcaatgggaactcgacaatcggaccaacctaatgcagcccggtcctgcggcagcgaccacctttagcggagaacctgaccgtcaagccatgcaaaacacgctggcttttagcaggaccgtctacgatcaaacgaccgccacgaccgatcgtaaccagatactcatcaccaacgaagacgaaatcagacccaccaactcggtcggtatcgacgcgtggggagcagttcccaccaacaaccagtcgatcgtgacccccggcactcgcgcggccgtcaacaatcaaggggcgcttcccgggatggtgtggcaaaacagagacatttaccctacagggacccatttggccaaaattcccgacactgacaatcacttccatccgtccccgcttattgggcggtttggctgcaagcatccccctccccagattttcattaaaaacacacccgtccctgccaacccttcggaaacgttccagacggccaaagtggcctccttcatcaaccagtactcgaccggacagtgcaccgtcgaaatcttttgggaactcaagaaggaaacctccaagcgctggaaccccgaaatccagttcacctccaactttggcaacgcggccgacatccagtttgccgtctccgacacgggatcctattccgaacctcgtcccatcggtacccgttaccttaccaaacctctgtaa

SEQ ID NO: 549 - protein, 535 aa, Artificial Sequence
  source: /note="Description of Artificial Sequence: Synthetic polypeptide"
MAEGGGGPVGDAGQGADGVGNSSGNWHCDSQWLENGVVTRTTRTWVLPSYNNHLYKRIQGPSGGDNNNKFFGFSTPWGYFDYNRFHCHFSPRDWQRLINNNWGIRPKAMRFRLFNIQVKEVTVQDFNTTIGNNLTSTVQVFADKDYQLPYVLGSATEGTFPPFPADIYTIPQYGYCTLNYNNEAVDRSAFYCLDYFPSDMLRTGNNFEFTYTFEDVPFHSMFAHNQTLDRLMNPLVDQYLWAFSSVSQAGSSGRALHYSRATKTNMAAQYRNWLPGPFFRDQQIFTGASNITKNNVFSVWEKGKQWELDNRTNLMQPGPAAATTFSGEPDRQAMQNTLAFSRTVYDQTTATTDRNQILITNEDEIRPTNSVGIDAWGAVPTNNQSIVTPGTRAAVNNQGALPGMVWQNRDIYPTGTHLAKIPDTDNHFHPSPLIGRFGCKHPPPQIFIKNTPVPANPSETFQTAKVASFINQYSTGQCTVEIFWELKKETSKRWNPEIQFTSNFGNAADIQFAVSDTGSYSEPRPIGTRYLTKPL

SEQ ID NO: 550 - protein, 440 aa, Artificial Sequence
  source: /note="Description of Artificial Sequence: Synthetic polypeptide"
MELVDWLVEKGITTEKEWLLENRESFRSFQASSNSARQIKTALQGAIQEMLLTKTAEDYLVGKDPVSDDDIRQNRIYKILELNHYDPAYVGSILVGWCQKKWGKRNTLWLFGHATTGKTNIAEAIAHAVPFYGCVNWTNENFPFNDCVEKMIIWWEEGKMTAKVVETAKAILGGSRVRVDQKCKASVPIEPTPVIITSNTNMCYVIDGNTTTFEHKQPLEDRMFKLELLTRLPDDFGKVTKQEVRQFFRWSQDHLTPVIPEFLVRKAESRKRPAPSGEGYISPTKRPALAEQQQASESADPVPTRYRIKCSKHCGMDKMLFPCQICESMNRDINICAIHKTTDCKECFPDYGDKDDVELPPCTEHNVSRCYQCHSGELYRVTSDSDEKPAPESDEGTEPSYAPCTIHHLMGKSHGLVTCAACRLKNSTLHDDLDDGDLEQ

SEQ ID NO: 551 - protein, 319 aa, Artificial Sequence
  source: /note="Description of Artificial Sequence: Synthetic polypeptide"
MELVDWLVEKGITTEKEWLLENRESFRSFQASSNSARQIKTALQGAIQEMLLTKTAEDYLVGKDPVSDDDIRQNRIYKILELNHYDPAYVGSILVGWCQKKWGKRNTLWLFGHATTGKTNIAEAIAHAVPFYGCVNWTNENFPFNDCVEKMIIWWEEGKMTAKVVETAKAILGGSRVRVDQKCKASVPIEPTPVIITSNTNMCYVIDGNTTTFEHKQPLEDRMFKLELLTRLPDDFGKVTKQEVRQFFRWSQDHLTPVIPEFLVRKAESRKRPAPSGEGYISPTKRPALAEQQQASESADPVPTRLVGAVGQKGSECCS

SEQ ID NO: 552 - protein, 662 aa, Artificial Sequence
  source: /note="Description of Artificial Sequence: Synthetic polypeptide"
MRSYYEVIVQLPNDVESQVPGISDSFVNWITSREWTLPEDADWDLDQVDQVQLTLGDKIQREIRTHWGTMAKEPDFHYFIQLEQGEVFFHLHVLLETCSVKPMVLGRYIRHIQQKIVSKVYCATSLRWKDGCVVTKTKNFGGANKVRAESYIPAYLIPKQQPEVQWAWTNVPEYIKACLHRELRASLARLHFEEAGVSQSKENLARTADGAPVMPTRVSKRYMELVDWLVEKGITTEKEWLLENRESFRSFQASSNSARQIKTALQGAIQEMLLTKTAEDYLVGKDPVSDDDIRQNRIYKILELNHYDPAYVGSILVGWCQKKWGKRNTLWLFGHATTGKTNIAEAIAHAVPFYGCVNWTNENFPFNDCVEKMIIWWEEGKMTAKVVETAKAILGGSRVRVDQKCKASVPIEPTPVIITSNTNMCYVIDGNTTTFEHKQPLEDRMFKLELLTRLPDDFGKVTKQEVRQFFRWSQDHLTPVIPEFLVRKAESRKRPAPSGEGYISPTKRPALAEQQQASESADPVPTRYRIKCSKHCGMDKMLFPCQICESMNRDINICAIHKTTDCKECFPDYGDKDDVELPPCTEHNVSRCYQCHSGELYRVTSDSDEKPAPESDEGTEPSYAPCTIHHLMGKSHGLVTCAACRLKNSTLHDDLDDGDLEQ

SEQ ID NO: 553 - protein, 541 aa, Artificial Sequence
  source: /note="Description of Artificial Sequence: Synthetic polypeptide"
MRSYYEVIVQLPNDVESQVPGISDSFVNWITSREWTLPEDADWDLDQVDQVQLTLGDKIQREIRTHWGTMAKEPDFHYFIQLEQGEVFFHLHVLLETCSVKPMVLGRYIRHIQQKIVSKVYCATSLRWKDGCVVTKTKNFGGANKVRAESYIPAYLIPKQQPEVQWAWTNVPEYIKACLHRELRASLARLHFEEAGVSQSKENLARTADGAPVMPTRVSKRYMELVDWLVEKGITTEKEWLLENRESFRSFQASSNSARQIKTALQGAIQEMLLTKTAEDYLVGKDPVSDDDIRQNRIYKILELNHYDPAYVGSILVGWCQKKWGKRNTLWLFGHATTGKTNIAEAIAHAVPFYGCVNWTNENFPFNDCVEKMIIWWEEGKMTAKVVETAKAILGGSRVRVDQKCKASVPIEPTPVIITSNTNMCYVIDGNTTTFEHKQPLEDRMFKLELLTRLPDDFGKVTKQEVRQFFRWSQDHLTPVIPEFLVRKAESRKRPAPSGEGYISPTKRPALAEQQQASESADPVPTRLVGAVGQKGSECCS

SEQ ID NO: 554 - protein, 743 aa, Artificial Sequence
  source: /note="Description of Artificial Sequence: Synthetic polypeptide"
MSLISDAIPDWLERLVKKGVNAAADFYHLESGPPRPKANQQTQESLEKDDSRGLVFPGYNYLGPFNGLDKGEPVNEADAAALEHDKAYDLEIKDGHNPYFEYNEADRRFQERLKDDTSFGGNLGKAIFQAKKRVLEPFGLVEDSKTAPTGDKRKGEDEPRLPDTSSQTPKKNKKPRKERPSGGAEDPGEGTSSNAGAAAPASSVGSSIMAEGGGGPVGDAGQGADGVGNSSGNWHCDSQWLENGVVTRTTRTWVLPSYNNHLYKRIQGPSGGDNNNKFFGFSTPWGYFDYNRFHCHFSPRDWQRLINNNWGIRPKAMRFRLFNIQVKEVTVQDFNTTIGNNLTSTVQVFADKDYQLPYVLGSATEGTFPPFPADIYTIPQYGYCTLNYNNEAVDRSAFYCLDYFPSDMLRTGNNFEFTYTFEDVPFHSMFAHNQTLDRLMNPLVDQYLWAFSSVSQAGSSGRALHYSRATKTNMAAQYRNWLPGPFFRDQQIFTGASNITKNNVFSVWEKGKQWELDNRTNLMQPGPAAATTFSGEPDRQAMQNTLAFSRTVYDQTTATTDRNQILITNEDEIRPTNSVGIDAWGAVPTNNQSIVTPGTRAAVNNQGALPGMVWQNRDIYPTGTHLAKIPDTDNHFHPSPLIGRFGCKHPPPQIFIKNTPVPANPSETFQTAKVASFINQYSTGQCTVEIFWELKKETSKRWNPEIQFTSNFGNAADIQFAVSDTGSYSEPRPIGTRYLTKPL

SEQ ID NO: 555 - protein, 598 aa, Artificial Sequence
  source: /note="Description of Artificial Sequence: Synthetic polypeptide"
TAPTGDKRKGEDEPRLPDTSSQTPKKNKKPRKERPSGGAEDPGEGTSSNAGAAAPASSVGSSIMAEGGGGPVGDAGQGADGVGNSSGNWHCDSQWLENGVVTRTTRTWVLPSYNNHLYKRIQGPSGGDNNNKFFGFSTPWGYFDYNRFHCHFSPRDWQRLINNNWGIRPKAMRFRLFNIQVKEVTVQDFNTTIGNNLTSTVQVFADKDYQLPYVLGSATEGTFPPFPADIYTIPQYGYCTLNYNNEAVDRSAFYCLDYFPSDMLRTGNNFEFTYTFEDVPFHSMFAHNQTLDRLMNPLVDQYLWAFSSVSQAGSSGRALHYSRATKTNMAAQYRNWLPGPFFRDQQIFTGASNITKNNVFSVWEKGKQWELDNRTNLMQPGPAAATTFSGEPDRQAMQNTLAFSRTVYDQTTATTDRNQILITNEDEIRPTNSVGIDAWGAVPTNNQSIVTPGTRAAVNNQGALPGMVWQNRDIYPTGTHLAKIPDTDNHFHPSPLIGRFGCKHPPPQIFIKNTPVPANPSETFQTAKVASFINQYSTGQCTVEIFWELKKETSKRWNPEIQFTSNFGNAADIQFAVSDTGSYSEPRPIGTRYLTKPL

SEQ ID NO: 556 - DNA, 4694 bp, Artificial Sequence
  source: /note="Description of Artificial Sequence: Synthetic polynucleotide"
tggccagtttccaagacaggctcgctcgctcactcgggccggggccccaaaggggcccctagcgaccgcttcgcggtcgcggcccgagtgagcgagcgagcctgtcttggaaactggccagcactccggtgaggtaatgccgtcacgtggtcgggaatgggaacgggaaatctcgcgagaacgtaaacaaatataagacggcgccacacggcgctgcgtcatacgcgcgcgcgcaccggcgagatgaggtcgtactacgaggtcatcgttcagctgcccaacgacgtcgagagtcaggtacctggaatctccgattcgttcgtcaactggattacgtcgcgagaatggacgttgcctgaggacgccgattgggatttggaccaggtcgatcaagttcaactgacgctcggcgacaaaatccaacgggagattcgaactcattgggggacgatggccaaagaaccggactttcactattttatccaactggaacaaggtgaggtgttctttcatttacacgtcctgctggaaacgtgttccgtaaagccgatggtactcggaagatatatccgacatattcaacaaaaaattgtgagtaaagtctactgcgccacgagcctacgatggaaggatggatgcgtggtgaccaagaccaaaaatttcgggggcgcgaacaaggtccgggccgagtcgtatattcccgcctacctgatcccgaaacagcaaccggaagtgcagtgggcgtggactaacgtgcccgagtatataaaagcgtgcttgcaccgagaactgcgtgccagtctcgcgcgacttcacttcgaggaggcgggcgtctcgcaatccaaggaaaatctcgcgagaactgcagacggcgctcccgtgatgccgacccgcgtcagcaaacgctacatggagctcgtggattggctcgtggagaaggggatcaccaccgagaaggaatggctgctggaaaacagagaaagctttcggagctttcaggcctcgagcaactcggcgcgtcagatcaagacggccctgcaaggcgccattcaggagatgcttctgaccaagacggcggaggactacctcgtcggaaaggatcccgtctcggacgacgacatccgtcagaaccgcatctacaagattctggaactgaaccactacgacccagcgtacgtggggagtattttggtcgggtggtgccagaagaaatggggcaagcgaaacacgctgtggctgttcggacatgcgaccaccggcaagaccaacatcgcggaggctattgcccatgctgtgccgttctatggatgcgttaactggaccaacgagaactttccgttcaacgactgcgtcgaaaaaatgattatctggtgggaggagggcaaaatgaccgccaaagtggtggaaacagccaaggcgattctgggaggatctcgggtgagagtggaccaaaaatgcaaagcttcggttccgatcgaaccgacgccggtcattattaccagtaacaccaacatgtgttatgtcatcgacgggaacacgaccacgttcgagcataagcagccgttggaggacaggatgtttaagctcgaattgctgactcggttgcctgatgactttggtaaggtgaccaaacaggaggtgcgtcaattcttcaggtggtctcaggatcacctgacccctgtgatcccagaattcctagtgcggaaggcggagtctcgcaaaagacccgccccttccggggaaggctatataagcccgacaaagcggcccgcgctcgcagagcagcagcaggcgtcggagagcgcggacccggttcccaccaggtatcgtatcaaatgctcgaaacattgcggtatggataaaatgttgtttccttgccaaatttgtgaatcgatgaacagagatattaatatttgtgctattcataaaacgaccgactgtaaagagtgtttccccgactacggggataaagatgatgtagaactacccccctgtacagaacacaacgtgtctcgttgttatcaatgtcattcgggcgaattgtatcgcgtgacttcggactctgacgagaaacctgcccccgagagtgatgaaggcaccgagccatcctatgctccctgcacgattcaccacctgatgggcaagagtcacgggttagtcacttgcgcggcgtgtcggttgaaaaatagtacgttgcatgatgacttggatgacggtgatctcgaacaataaatgattgaaatgtagccatgtctctcatttctgatgcgattccagattggttggagcggttggtcaaaaagggagtgaatgctgcagctgatttctaccatttggaaagcggtcctcctcgtcctaaggcaaatcagcaaactcaagaatctcttgaaaaggacgattcgagaggtctcgtgttcccaggctacaattatctaggccctttcaacggtctagataaaggagaacccgtcaacgaggcagacgctgccgccttagaacacgacaaggcttacgacctcgaaatcaaggacgggcacaacccgtactttgagtacaacgaggccgacagacgtttccaggaacgtctcaaagacgatacctcctttggaggcaatttaggtaaagccatcttccaggccaaaaagagggttctcgaaccctttggtctggtggaagactcaaagacggctccgaccggagacaagcggaaaggcgaagacgaacctcgtttgcccgacacttcttcacagactcccaagaaaaacaagaagcctcgcaaggaaagaccttccggcggggcagaagatccgggcgaaggcacctcttccaacgctggagcagcagcacccgcctctagtgtgggatcatctatcatggctgaaggaggtggcggcccagtgggcgatgcaggccagggtgccgatggagtgggcaattcctccggaaattggcattgcgattcccaatggctggaaaacggagtcgtcactcgaaccacccgaacctgggtcttgcccagctacaacaaccacctgtacaaacgaatccaaggacccagcggaggcgacaacaacaacaaattctttggattcagcaccccctggggatactttgactacaatcgattccactgccacttttccccgcgagactggcaacgactcatcaacaacaactggggcatccgtcccaaagcgatgcgctttagactctttaacatccaggttaaagaggtcacggtccaagacttcaacaccaccatcggcaacaacctcaccagtacggtccaggtctttgcggacaaggactaccaactgccgtacgtcctcggatcggctaccgaaggcaccttcccgccgttcccagcggatatctacacgatcccgcagtacgggtactgcacgctaaactacaacaacgaggcggtggatcgttcggccttctactgtctggactactttccctcagacatgctgcggacaggaaataactttgagtttacttacaccttcgaggacgttcctttccatagcatgtttgcccacaaccagacgctagaccggctgatgaatcccctcgtggatcagtacctctgggctttcagctccgtcagccaagcaggctcatctggacgagctcttcattactcgcgggcgactaaaaccaacatggcggctcaatataggaactggttacctgggcctttcttccgtgatcagcaaatctttacgggcgctagcaacatcactaaaaataacgtctttagcgtttgggaaaaaggcaagcaatgggaactcgacaatcggaccaacctaatgcagcccggtcctgcggcagcgaccacctttagcggagaacctgaccgtcaagccatgcaaaacacgctggcttttagcaggaccgtctacgatcaaacgaccgccacgaccgatcgtaaccagatactcatcaccaacgaagacgaaatcagacccaccaactcggtcggtatcgacgcgtggggagcagttcccaccaacaaccagtcgatcgtgacccccggcactcgcgcggccgtcaacaatcaaggggcgcttcccgggatggtgtggcaaaacagagacatttaccctacagggacccatttggccaaaattcccgacactgacaatcacttccatccgtccccgcttattgggcggtttggctgcaagcatccccctccccagattttcattaaaaacacacccgtccctgccaacccttcggaaacgttccagacggccaaagtggcctccttcatcaaccagtactcgaccggacagtgcaccgtcgaaatcttttgggaactcaagaaggaaacctccaagcgctggaaccccgaaatccagttcacctccaactttggcaacgcggccgacatccagtttgccgtctccgacacgggatcctattccgaacctcgtcccatcggtacccgttaccttaccaaacctctgtaaattaaacccttcaataaaccgtttatgcgtaactgtatttccgtctcctgtcgttattcagtcacatgatgcggcattacctcaccggagtgctggccagtttccaagacaggctcgctcgctcactcgggccggggccccaaaggggcccctagcgaccgcttcgcggtcgcggcccgagtgagcgagcgagcctgtcttggaaactggcca

SEQ ID NO: 557 - DNA, 2211 bp, Artificial Sequence
  source: /note="Description of Artificial Sequence: Synthetic polynucleotide"
atggctgctgatggttatcttccagattggctcgaggacactctctctgaaggaataagacagtggtggaagctcaaacctggcccaccaccaccaaagcccgcagagcggcataaggacgacagcaggggtcttgtgcttcctgggtacaagtacctcggacccttcaacggactcgacaagggagagccggtcaacgaggcagacgcagcggccctcgagcacgacaaggcctacgaccagcagctcaaggccggtgacaacccctacctcaagtacaaccacgccgacgcggagttccagcagcggcttcagggcgacacatcgtttgggggcaacctcggcagagcagtcttccaggccaaaaagagggttcttgaacctcttggtctggttgagcaagcgggtgagacggctcctggaaagaagagaccgttgattgaatccccccagcagcccgactcctccacgggtatcggcaaaaaaggcaagcagccggctaaaaagagactcaattttggtcagactggcgactcagagtcagtccccgacccacaacctctcggagaacctccagcaacccccgctgctgtgggacctactacaatggcttcaggtggtggcgcaccaatggcagacaataacgaaggcgccgacggagtgggtaatgcctcaggaaattggcattgcgattccacatggctgggcgacagagtcatcaccaccagcacccgcacctgggccttgcccacctacaataaccacctctacaagcaaatctccagtgcttcaacgggggccagcaacgacaaccactacttcggctacagcaccccctgggggtattttgacttcaacagattccactgccacttttcaccacgtgactggcagcgactcatcaacaacaattggggattccggcccaagagactcaacttcaaactcttcaacatccaagtcaaggaggtcacgacgaatgatggcgtcacaaccatcgctaataaccttaccagcacggttcaagtcttctcggactcagactatcagctcccgtacgtgctcgggtcggctcacgagggctgcctcccgccgttcccagcagacgtcttcatggtgccacagtatggatacctcaccctgaacaacgggagtcaggcagtaggacgctcttcattttactgcctggagtactttccttctcagatgctgcgtaccggaaacaactttaccttcagctacacttttgaggacgttcctttccacagcagctacgctcacagccagagtctggaccgtctcatgaatcctctcatcgaccagtacctgtattacctgaacagaactcagaatcagtccggaagtgcccaaaacaaggacttgctgtttagccgggggtctccagctggcatgtctgttcagcccaaaaactggctacctggaccctgttatcggcagcagcgcgtttctaaaacaaaaacagacaacaacaacagcaactttacctggactggtgcttcaaaatataaccttaatgggcgtgaatctataatcaaccctggcactgctatggcctcacacaaagacgacaaagacaagttctttcccatgagcggtgtcatgatttttggaaaggagagcgccggagcttcaaacactgcattggacaatgtcatgatcacagacgaagaggaaatcaaagccactaaccccgtggccaccgaaagatttgggactgtggcagtcaatctccagagcagcagcacagaccctgcgaccggagatgtgcatgttatgggagccttacctggaatggtgtggcaagacagagacgtatacctgcagggtcccatttgggccaaaattcctcacacagatggacactttcacccgtctcctcttatgggcggctttggactcaagaacccgcctcctcagatcctcatcaaaaacacgcctgttcctgcgaatcctccggcggagttttcagctacaaagtttgcttcattcatcacccaatactccacaggacaagtgagtgtggaaattgaatgggagctgcagaaagaaaacagcaagcgctggaatcccgaagtgcagtacacatccaattatgcaaaatctgccaacgttgattttactgtggacaacaatggactttatactgagcctcgccccattggcacccgttacctcacccgtcccctgtaa

SEQ ID NO: 558 - protein, 736 aa, Artificial Sequence
  source: /note="Description of Artificial Sequence: Synthetic polypeptide"
MAADGYLPDWLEDTLSEGIRQWWKLKPGPPPPKPAERHKDDSRGLVLPGYKYLGPFNGLDKGEPVNEADAAALEHDKAYDQQLKAGDNPYLKYNHADAEFQQRLQGDTSFGGNLGRAVFQAKKRVLEPLGLVEQAGETAPGKKRPLIESPQQPDSSTGIGKKGKQPAKKRLNFGQTGDSESVPDPQPLGEPPATPAAVGPTTMASGGGAPMADNNEGADGVGNASGNWHCDSTWLGDRVITTSTRTWALPTYNNHLYKQISSASTGASNDNHYFGYSTPWGYFDFNRFHCHFSPRDWQRLINNNWGFRPKRLNFKLFNIQVKEVTTNDGVTTIANNLTSTVQVFSDSDYQLPYVLGSAHEGCLPPFPADVFMVPQYGYLTLNNGSQAVGRSSFYCLEYFPSQMLRTGNNFTFSYTFEDVPFHSSYAHSQSLDRLMNPLIDQYLYYLNRTQNQSGSAQNKDLLFSRGSPAGMSVQPKNWLPGPCYRQQRVSKTKTDNNNSNFTWTGASKYNLNGRESIINPGTAMASHKDDKDKFFPMSGVMIFGKESAGASNTALDNVMITDEEEIKATNPVATERFGTVAVNLQSSSTDPATGDVHVMGALPGMVWQDRDVYLQGPIWAKIPHTDGHFHPSPLMGGFGLKNPPPQILIKNTPVPANPPAEFSATKFASFITQYSTGQVSVEIEWELQKENSKRWNPEVQYTSNYAKSANVDFTVDNNGLYTEPRPIGTRYLTRPL

SEQ ID NO: 559 - DNA, 2211 bp, Artificial Sequence
  source: /note="Description of Artificial Sequence: Synthetic polynucleotide"
atggcttccgatggttatcttccagattggctcgaggacaacctctctgagggcatccgcgagtggtgggacttgaaacctggagccccgaaacccaaagccaaccagcaaaagcaggacgacggccggggtctggtgcttcctggctacaagtacctcggacccttcaacggactcgacaagggggagcccgtcaacgcggcggatgcagcggccctcgagcacgacaaggcctacgaccagcagctcagagcgggtgacaatccgtacctgcggtataaccacgccgacgccgagtttcaggagcgtctgcaagaagatacgtcttttgggggcaacctcgggcgagcagtcttccaggccaagaagagggttctcgaaccttttggtctggttgaggaaggtgctaagacggctcctggaaagaaacgtccggtagagcagtcgccacaagagccagactcctcctcgggcattggcaagacaggccagcagcccgctaaaaagagactcaattttggtcagactggcgactcagagtcagtccccgacccacaacctctcggagaacctccagcaacccccgctgctgtgggacctactacaatggcttcaggcggtggcgcaccaatggcagacaataacgaaggcgccgacggagtgggtaatgcctcaggaaattggcattgcgattccacatggctgggcgacagagtcatcaccaccagcacccgaacatgggccttgcccacctataacaaccacctctacaagcaaatctccagtgcttcaacgggggccagcaacgacaaccactacttcggctacagcaccccctgggggtattttgatttcaacagattccactgccatttctcaccacgtgactggcagcgactcatcaacaacaattggggattccggcccaagagactcaacttcaaactcttcaacatccaagtcaaggaggtcacgacgaatgatggcgtcacaaccatcgctaataaccttaccagcacggttcaagtcttctcggactcggagtaccagcttccgtacgtcctcggctctgcgcaccagggctgcctccctccgttcccggcggacgtgttcatgattccgcagtacggctacctaacgctcaacaatggcagccaggcagtgggacggtcatccttttactgcctggaatatttcccatcgcagatgctgagaacgggcaataactttaccttcagctacaccttcgaggacgtgcctttccacagcagctacgcgcacagccagagcctggaccggctgatgaatcctctcatcgaccagtacctgtattacctgaacagaactcagaatcagtccggaagtgcccaaaacaaggacttgctgtttagccgggggtctccagctggcatgtctgttcagcccaaaaactggctacctggaccctgttaccggcagcagcgcgtttctaaaacaaaaacagacaacaacaacagcaactttacctggactggtgcttcaaaatataaccttaatgggcgtgaatctataatcaaccctggcactgctatggcctcacacaaagacgacaaagacaagttctttcccatgagcggtgtcatgatttttggaaaggagagcgccggagcttcaaacactgcattggacaatgtcatgatcacagacgaagaggaaatcaaagccactaaccccgtggccaccgaaagatttgggactgtggcagtcaatctccagagcagcagcacagaccctgcgaccggagatgtgcatgttatgggagccttacctggaatggtgtggcaagacagagacgtatacctgcagggtcccatttgggccaaaattcctcacacagatggacactttcacccgtctcctcttatgggcggctttggacttaagcacccgcctcctcagatcctcatcaaaaacacgcctgttcctgcgaatcctccggcagagttttcggctacaaagtttgcttcattcatcacccagtattctactggccaagtcagcgtggagattgaatgggagctgcagaaagaaaacagcaaacgctggaatcccgaagtgcagtatacatctaactatgcaaaatctgccaacgttgatttcactgtggacaacaatggactttatactgagcctcgtcccattggcacccgttacctcacccgtcccctgtaa

SEQ ID NO: 560 - protein, 736 aa, Artificial Sequence
  source: /note="Description of Artificial Sequence: Synthetic polypeptide"
MASDGYLPDWLEDNLSEGIREWWDLKPGAPKPKANQQKQDDGRGLVLPGYKYLGPFNGLDKGEPVNAADAAALEHDKAYDQQLRAGDNPYLRYNHADAEFQERLQEDTSFGGNLGRAVFQAKKRVLEPFGLVEEGAKTAPGKKRPVEQSPQEPDSSSGIGKTGQQPAKKRLNFGQTGDSESVPDPQPLGEPPATPAAVGPTTMASGGGAPMADNNEGADGVGNASGNWHCDSTWLGDRVITTSTRTWALPTYNNHLYKQISSASTGASNDNHYFGYSTPWGYFDFNRFHCHFSPRDWQRLINNNWGFRPKRLNFKLFNIQVKEVTTNDGVTTIANNLTSTVQVFSDSEYQLPYVLGSAHQGCLPPFPADVFMIPQYGYLTLNNGSQAVGRSSFYCLEYFPSQMLRTGNNFTFSYTFEDVPFHSSYAHSQSLDRLMNPLIDQYLYYLNRTQNQSGSAQNKDLLFSRGSPAGMSVQPKNWLPGPCYRQQRVSKTKTDNNNSNFTWTGASKYNLNGRESIINPGTAMASHKDDKDKFFPMSGVMIFGKESAGASNTALDNVMITDEEEIKATNPVATERFGTVAVNLQSSSTDPATGDVHVMGALPGMVWQDRDVYLQGPIWAKIPHTDGHFHPSPLMGGFGLKHPPPQILIKNTPVPANPPAEFSATKFASFITQYSTGQVSVEIEWELQKENSKRWNPEVQYTSNYAKSANVDFTVDNNGLYTEPRPIGTRYLTRPL

SEQ ID NO: 561 - DNA, 2211 bp, Artificial Sequence
  source: /note="Description of Artificial Sequence: Synthetic polynucleotide"
atggctgctgatggttatcttccagattggctcgaggacactctctctgaaggaataagacagtggtggaagctcaaacctggcccaccaccaccaaagcccgcagagcggcataaggacgacagcaggggtcttgtgcttcctgggtacaagtacctcggacccttcaacggactcgacaagggagagccggtcaacgaggcagacgcagcggccctcgagcacgacaaggcctacgaccagcagctcaaggccggtgacaacccctacctcaagtacaaccacgccgacgcggagttccagcagcggcttcagggcgacacatcgtttgggggcaacctcggcagagcagtcttccaggccaaaaagagggttcttgaacctcttggtctggttgagcaagcgggtgagacggctcctggaaagaagagaccgttgattgaatccccccagcagcccgactcctccacgggtatcggcaaaaaaggcaagcagccggctaaaaagagactcaattttggtcagactggcgactcagagtcagtccccgacccacaacctctcggagaacctccagcaacccccgctgctgtgggacctactacaatggcttcaggtggtggcgcaccaatggcagacaataacgaaggcgccgacggagtgggtaatgcctcaggaaattggcattgcgattccacatggctgggcgacagagtcatcaccaccagcacccgcacctgggccttgcccacctacaataaccacctctacaagcaaatctccagtgcttcaacgggggccagcaacgacaaccactacttcggctacagcaccccctgggggtattttgacttcaacagattccactgccacttttcaccacgtgactggcagcgactcatcaacaacaattggggattccggcccaagagactcaacttcaaactcttcaacatccaagtcaaggaggtcacgacgaatgatggcgtcacaaccatcgctaataaccttaccagcacggttcaagtcttctcggactcagactatcagctcccgtacgtgctcgggtcggctcacgagggctgcctcccgccgttcccagcagacgtcttcatggtgccacagtatggatacctcaccctgaacaacgggagtcaggcagtaggacgctcttcattttactgcctggagtactttccttctcagatgctgcgtaccggaaacaactttaccttcagctacacttttgaggacgttcctttccacagcagctacgctcacagccagagtctggaccgtctcatgaatcctctcatcgaccagtacctgtattacctgaacagaactcagaatcagtccggaagtgcccaaaacaaggacttgctgtttagccgggggtctccaactggcatgtctgttcagcccaaaaactggctacctggaccctgttatcggcagcagcgcgtttctaaaacaaaaacagacaacaacaacagcaactttacctggactggtgcttcaaaatataaccttaatgggcgtgaatctataatcaaccctggcactgctatggcctcacacaaagacgacaaagacaagttctttcccatgagcggtgtcatgatttttggaaaggagagcgccggagcttcaaacactgcattggacaatgtcatgatcacagacgaagaggaaatcaaagccactaaccccgtggccactgaaagatttgggactgtggcagtcaatctccagagcagcagcacagaccctgcgaccggagatgtgcatgccatgggagccttacctggaatggtgtggcaagacagagacgtatacctgcagggtcctatttgggccaaaattcctcacacggatggacactttcacccgtctcctctcatgggcggctttggactcaagaacccgcctcctcagatcctcatcaaaaacacgcctgttcctgcgaatcctccggcggagttttcagctacaaagtttgcttcattcatcacccagtattccacaggacaagtgagcgtggagattgaatgggagctgcagaaagaaaacagcaaacgctggaatcccgaagtgcagtatacatctaactatgcaaaatctgccaacgttgatttcactgtggacaacaatggactttatactgagcctcgccccattggcacccgttacctcacccgtcccctgtaa

SEQ ID NO: 562 - protein, 736 aa, Artificial Sequence
  source: /note="Description of Artificial Sequence: Synthetic polypeptide"
MAADGYLPDWLEDTLSEGIRQWWKLKPGPPPPKPAERHKDDSRGLVLPGYKYLGPFNGLDKGEPVNEADAAALEHDKAYDQQLKAGDNPYLKYNHADAEFQQRLQGDTSFGGNLGRAVFQAKKRVLEPLGLVEQAGETAPGKKRPLIESPQQPDSSTGIGKKGKQPAKKRLNFGQTGDSESVPDPQPLGEPPATPAAVGPTTMASGGGAPMADNNEGADGVGNASGNWHCDSTWLGDRVITTSTRTWALPTYNNHLYKQISSASTGASNDNHYFGYSTPWGYFDFNRFHCHFSPRDWQRLINNNWGFRPKRLNFKLFNIQVKEVTTNDGVTTIANNLTSTVQVFSDSDYQLPYVLGSAHEGCLPPFPADVFMVPQYGYLTLNNGSQAVGRSSFYCLEYFPSQMLRTGNNFTFSYTFEDVPFHSSYAHSQSLDRLMNPLIDQYLYYLNRTQNQSGSAQNKDLLFSRGSPTGMSVQPKNWLPGPCYRQQRVSKTKTDNNNSNFTWTGASKYNLNGRESIINPGTAMASHKDDKDKFFPMSGVMIFGKESAGASNTALDNVMITDEEEIKATNPVATERFGTVAVNLQSSSTDPATGDVHAMGALPGMVWQDRDVYLQGPIWAKIPHTDGHFHPSPLMGGFGLKNPPPQILIKNTPVPANPPAEFSATKFASFITQYSTGQVSVEIEWELQKENSKRWNPEVQYTSNYAKSANVDFTVDNNGLYTEPRPIGTRYLTRPL

SEQ ID NO: 563 - DNA, 2211 bp, Artificial Sequence
  source: /note="Description of Artificial Sequence: Synthetic polynucleotide"
atggctgccgatggttatcttccagattggctcgaggacaacctctctgagggcattcgcgagtggtgggcgctgaaacctggagccccgaagcccaaagccaaccagcaaaagcaggacgacggccggggtctggtgcttcctggctacaagtacctcggacccttcaacggactcgacaagggggagcccgtcaacgcggcggatgcagcggccctcgagcacgacaaggcctacgaccagcagctcaaagcgggtgacaatccgtacctgcggtataaccacgccgacgccgagtttcaggagcgtctgcaagaagatacgtcttttgggggcaacctcgggcgagcagtcttccaggccaagaagcgggttctcgaacctctcggtctggttgaggaaggcgctaagacggctcctggaaagaaacgtccggtagagcaatcgccacaagagccagactcctcctcgggcatcggcaagacaggccagcagcccgctaaaaagagactcaattttggtcagactggcgactcagagtcagtccccgacccacaacctctcggagaacctccagcaacccccgctgctgtgggacctactacaatggcttcaggcggtggcgcaccaatggcagacaataacgaaggcgccgacggagtgggtaatgcctcaggaaattggcattgcgattccacatggctgggcgacagagtcatcaccaccagcacccgaacatgggccttgcccacctataacaaccacctctacaagcaaatctccagtgcttcgacgggggccagcaacgacaaccactacttcggctacagcaccccctgggggtattttgactttaacagattccactgccacttttcaccacgtgactggcagcgactcatcaacaacaactggggattccggcccaagagactcagcttcaagctcttcaacatccaggtcaaggaggtcacgacgaatgatggcgtcacaaccatcgctaataaccttaccagcacggttcaagtcttctcggactcggagtaccagcttccgtacgtcctcggctctgcgcaccagggctgcctccctccgttcccggcggacgtgttcatgattccgcaatacggctacctgacgctcaacaatggcagccaagccgtgggacgttcatccttttactgcctggaatatttcccttctcagatgctgagaacgggcaacaactttaccttcagctacacctttgaggaagtgcctttccacagcagctacgcgcacagccagagcctggaccggctgatgaatcctctcatcgatcaatacctgtattacctgaacagaactcaaaatcagtccggaagtgcccaaaacaaggacttgctgtttagccgtgggtctccagctggcatgtctgttcagcccaaaaactggctacctggaccctgttatcggcagcagcgcgtttctaaaacaaaaacagacaacaacaacagcaattttacctggactggtgcttcaaaatataacctcaatgggcgtgaatccatcatcaaccctggcactgctatggcctcacataaagacgacgaagacaagttctttcccatgagcggtgtcatgatttttggaaaagagagcgccggagcttcaaacactgcattggacaatgtcatgattacagacgaagaggaaattaaagccactaaccctgtggccaccgaaagatttgggaccgtggcagtcaatttccagagcagcagcacagaccctgcgaccggagatgtgcatgctatgggagcattacctggcatggtgtggcaagatagagacgtgtacctgcagggtcccatttgggccaaaattcctcacacagatggacactttcacccgtctcctcttatgggcggctttggactcaagaacccgcctcctcagatcctcatcaaaaacacgcctgttcctgcgaatcctccggcggagttttcagctacaaagtttgcttcattcatcacccaatactccacaggacaagtgagcgtggagattgaatgggagctgcagaaagaaaacagcaaacgctggaatcccgaagtgcagtatacatctaactatgcaaaatctgccaacattgatttcactgtggacaacaatggactttatactgagcctcgccccattggcacccgttacctcacccgtccccagtaa

SEQ ID NO: 564 - protein, 736 aa, Artificial Sequence
  source: /note="Description of Artificial Sequence: Synthetic polypeptide"
MAADGYLPDWLEDNLSEGIREWWALKPGAPKPKANQQKQDDGRGLVLPGYKYLGPFNGLDKGEPVNAADAAALEHDKAYDQQLKAGDNPYLRYNHADAEFQERLQEDTSFGGNLGRAVFQAKKRVLEPLGLVEEGAKTAPGKKRPVEQSPQEPDSSSGIGKTGQQPAKKRLNFGQTGDSESVPDPQPLGEPPATPAAVGPTTMASGGGAPMADNNEGADGVGNASGNWHCDSTWLGDRVITTSTRTWALPTYNNHLYKQISSASTGASNDNHYFGYSTPWGYFDFNRFHCHFSPRDWQRLINNNWGFRPKRLSFKLFNIQVKEVTTNDGVTTIANNLTSTVQVFSDSEYQLPYVLGSAHQGCLPPFPADVFMIPQYGYLTLNNGSQAVGRSSFYCLEYFPSQMLRTGNNFTFSYTFEEVPFHSSYAHSQSLDRLMNPLIDQYLYYLNRTQNQSGSAQNKDLLFSRGSPAGMSVQPKNWLPGPCYRQQRVSKTKTDNNNSNFTWTGASKYNLNGRESIINPGTAMASHKDDEDKFFPMSGVMIFGKESAGASNTALDNVMITDEEEIKATNPVATERFGTVAVNFQSSSTDPATGDVHAMGALPGMVWQDRDVYLQGPIWAKIPHTDGHFHPSPLMGGFGLKNPPPQILIKNTPVPANPPAEFSATKFASFITQYSTGQVSVEIEWELQKENSKRWNPEVQYTSNYAKSANIDFTVDNNGLYTEPRPIGTRYLTRPQ

SEQ ID NO: 565 - DNA, 2211 bp, Artificial Sequence
  source: /note="Description of Artificial Sequence: Synthetic polynucleotide"
atggctgccgatggttatcttccagattggctcgaggacaacctctctgagggcattcgcgagtggtgggacttgaaacctggagccccgaaacccaaagccaaccagcaaaagcaggacgacggccggggtctggtgcttcctggctacaagtacctcggacccttcaacggactcgacaagggggagcccgtcaacgcggcggatgcagcggccctcgagcacgacaaggcctacgaccagcagctcaaagcgggtgacaatccgtaccttcggtataaccacgccgacgccgagtttcaggagcgtctgcaagaagatacgtcttttgggggcaacctcgggcgagcagtcttccaggccaaaaagagggttctcgaacctctcggtctggttgaggaagcggctaagacggctcctggaaagaaacgtccggtagagcagtcgccacaagagccagactcctcctcgggcattggcaagacaggccagcagcccgctaaaaagagactcaattttggtcagactggcgactcagagtcagtccccgacccacaacctctcggagaacctcccgcagccccctcaggtgtgggatctcttacaatggcttcaggtggtggcgcaccaatggcagacaataacgaaggcgccgacggagtgggtaatgcctcaggaaattggcattgcgattccacatggctgggcgacagagtcatcaccaccagcacccgcacctgggccttgcccacctacaataaccacctctacaagcaaatctccagtgcttcaacgggggccagcaacgacaaccactacttcggctacagcaccccctgggggtattttgacttcaacagattccactgccacttttcaccacgtgactggcaaagactcatcaacaacaattggggattccggcccaagagactcaacttcaagctcttcaacatccaagtcaaggaggtcacgacgaatgatggcgtcacgaccatcgctaataaccttaccagcacggttcaagtcttctcggactcggagtaccagttgccgtacgtcctcggctctgcgcaccagggctgcctccctccgttcccggcggacgtgttcatgattccgcagtacggctacctaacgctcaacaatggcagccaggcagtgggacggtcatccttttactgcctggaatatttcccatcgcagatgctgagaacgggcaacaactttaccttcagctacacctttgaggaagtgcctttccacagcagctacgcgcacagccagagcctggaccggctgatgaatcctctcatcgaccagtacctgtattacctgaacagaactcaaaatcagtccggaagtgcccaaaacaaggacttgctgtttagccgtgggtctccagctggcatgtctgttcagcccaaaaactggctacctggaccctgttaccggcagcagtgcgtttctaaaacaaaaacagacaacaacaacagcaactttacctggactggtgcttcaaaatataaccttaatgggcgtgaatctataatcaaccctggcactgctatggcctcacacaaagacgacaaagacaagttctttcccatgagcggtgtcatgatttttggaaaggagagcgccggagcttcaaacactgcattggacaatgtcatgatcacagacgaagaggaaatcaaagccactaaccccgtggccaccgaaagatttgggactgtggcagtcaatctccagagcagcagcacagaccctgcgaccggagatgtgcatgttatgggagccttacctggaatggtgtggcaagacagagacgtatacctgcagggtcctatttgggccaaaattcctcacacagatggacactttcacccgtctcctcttatgggcggctttggactcaagaacccgcctcctcagatcctcatcaaaaacacgcctgttcctgcgaatcctccggcggagttttcagctacaaagtttgcttcattcatcacccaatactccacaggacaagtgagcgtggagattgaatgggagctgcagaaagaaaacagcaagcgctggaatcccgaagtgcagtacacatccaattatgcaaaatctgccaacgttgatttcactgtggacaacaatggactttatactgagcctcgccccattggcacccgttacctcacccgtcccctgtaa

SEQ ID NO: 566 - protein, 736 aa, Artificial Sequence
  source: /note="Description of Artificial Sequence: Synthetic polypeptide"
MAADGYLPDWLEDNLSEGIREWWDLKPGAPKPKANQQKQDDGRGLVLPGYKYLGPFNGLDKGEPVNAADAAALEHDKAYDQQLKAGDNPYLRYNHADAEFQERLQEDTSFGGNLGRAVFQAKKRVLEPLGLVEEAAKTAPGKKRPVEQSPQEPDSSSGIGKTGQQPAKKRLNFGQTGDSESVPDPQPLGEPPAAPSGVGSLTMASGGGAPMADNNEGADGVGNASGNWHCDSTWLGDRVITTSTRTWALPTYNNHLYKQISSASTGASNDNHYFGYSTPWGYFDFNRFHCHFSPRDWQRLINNNWGFRPKRLNFKLFNIQVKEVTTNDGVTTIANNLTSTVQVFSDSEYQLPYVLGSAHQGCLPPFPADVFMIPQYGYLTLNNGSQAVGRSSFYCLEYFPSQMLRTGNNFTFSYTFEEVPFHSSYAHSQSLDRLMNPLIDQYLYYLNRTQNQSGSAQNKDLLFSRGSPAGMSVQPKNWLPGPCYRQQCVSKTKTDNNNSNFTWTGASKYNLNGRESIINPGTAMASHKDDKDKFFPMSGVMIFGKESAGASNTALDNVMITDEEEIKATNPVATERFGTVAVNLQSSSTDPATGDVHVMGALPGMVWQDRDVYLQGPIWAKIPHTDGHFHPSPLMGGFGLKNPPPQILIKNTPVPANPPAEFSATKFASFITQYSTGQVSVEIEWELQKENSKRWNPEVQYTSNYAKSANVDFTVDNNGLYTEPRPIGTRYLTRPL

SEQ ID NO: 567 - DNA, 2211 bp, Artificial Sequence
  source: /note="Description of Artificial Sequence: Synthetic polynucleotide"
atggctgccgatggttatcttccagattggctcgaggacaacctctctgagggcattcgcgaatggtgggacttgaaacctggagccccgaaacccaaagtcaaccagcaaaagcaggacaacgctcggggtcttgtgcttccgggttacaaatacctcggacccttcaacggactcgacaagggggagcccgtcaacgcggcggacgcagcggccctcgagcacgacaaggcctacgaccagcagctcaaagcgggtgacaatccgtaccttcggtataaccacgccgacgccgagtttcaggagcgtctgcaagaagatacgtcttttgggggcaaccttggacgagcagtcttccaggccaagaagagggttctcgaaccttttggtctggttgaggaaggtgctaagacggctcctggaaagaaacgtccggtagagcagtcgccacaagagccagactcctcctcgggcattggcaagacaggccagcagcccgctaaaaagagactcaattttggtcagactggcgactcagagtcagtccccgacccacaacctctcggagaacctccagcaacccccgctgctgtgggacctactacaatggcttcaggcggtggcgcaccaatggcagacaataacgaaggcgccgacggagtgggtaatgcctcaggaaattggcattgcgattccacatggctgggcgacagagtcatcaccaccagcacccgcacctgggccttgcccacctacaataaccacctctacaagcaaatctccagtgcttcaacgggggccagcaacgacaaccactacttcggctacagcaccccctgggggtattttgacttcaacagattccactgccacttttcaccacgtgactggcaaagactcatcaacaacaattggggattccggcccaagagactcaacttcaagctcttcaacatccaagtcaaggaggtcacgacgaatgatggcgtcacgaccatcgctaataaccttaccagcacggttcaagtcttctcggactcggagtaccagttgccgtacgtcctcggctctgcgcaccagggctgcctccctccgttcccggcggacgtgttcatgattccgcaatacggctacctgacgctcaacaatggcagccaggcagtgggacggtcatccttttactgcctggaatatttcccatcgcagatgctgagaacgggcaataactttaccttcagctacacttttgaggacgttcctttccacagcagctacgctcacagccagagcctggaccggctgatgaatcctctcatcgaccagtacctgtattacctgaacagaactcagaatcagtccggaagtgcccaaaacaaggacttgctgtttagccgtgggtctccaactggcatgtctgttcagcccaaaaactggctacctggaccctgttatcggcagcagcgcgtttctaaaacaaaaacagacaacaacaacagcaactttacctggactggtgcttcaaaatataaccttaatgggcgtgaatctataatcaaccctggcactgctatggcctcacacaaagacgacgaagacaagttctttcccatgagcggtgtcatgatttttggaaaggagagcgccggagcttcaaacactgcattggacaatgtcatgatcacagacgaagaggaaatcaaagccactaaccccgtggccactgaaagatttgggactgtggcagtcaatctccagagcagcagcacagaccctgcgaccggagatgtgcatgccatgggagccttacctggaatggtgtggcaagacagagacgtatacctgcagggtcctatttgggccaaaattcctcacacggatggacactttcacccgtctcctctcatgggcggctttggacttaagcacccgcctcctcagatcctcatcaaaaacacgcctgttcctgcgaatcctccggcagagttttcggctacaaagtttgcttcattcatcacccagtattccacaggacaagtgagcgtggagattgaatgggagctgcagaaagaaaacagcaaacgctggaatcccgaagtgcagtatacatctaactatgcaaaatctgccaacgttgatttcactgtggacaacaatggactttatactgagcctcgccccattggcacccgttacctcacccgtcccctgtaa

SEQ ID NO: 568 - protein, 736 aa, Artificial Sequence
  source: /note="Description of Artificial Sequence: Synthetic polypeptide"
MAADGYLPDWLEDNLSEGIREWWDLKPGAPKPKVNQQKQDNARGLVLPGYKYLGPFNGLDKGEPVNAADAAALEHDKAYDQQLKAGDNPYLRYNHADAEFQERLQEDTSFGGNLGRAVFQAKKRVLEPFGLVEEGAKTAPGKKRPVEQSPQEPDSSSGIGKTGQQPAKKRLNFGQTGDSESVPDPQPLGEPPATPAAVGPTTMASGGGAPMADNNEGADGVGNASGNWHCDSTWLGDRVITTSTRTWALPTYNNHLYKQISSASTGASNDNHYFGYSTPWGYFDFNRFHCHFSPRDWQRLINNNWGFRPKRLNFKLFNIQVKEVTTNDGVTTIANNLTSTVQVFSDSEYQLPYVLGSAHQGCLPPFPADVFMIPQYGYLTLNNGSQAVGRSSFYCLEYFPSQMLRTGNNFTFSYTFEDVPFHSSYAHSQSLDRLMNPLIDQYLYYLNRTQNQSGSAQNKDLLFSRGSPTGMSVQPKNWLPGPCYRQQRVSKTKTDNNNSNFTWTGASKYNLNGRESIINPGTAMASHKDDEDKFFPMSGVMIFGKESAGASNTALDNVMITDEEEIKATNPVATERFGTVAVNLQSSSTDPATGDVHAMGALPGMVWQDRDVYLQGPIWAKIPHTDGHFHPSPLMGGFGLKHPPPQILIKNTPVPANPPAEFSATKFASFITQYSTGQVSVEIEWELQKENSKRWNPEVQYTSNYAKSANVDFTVDNNGLYTEPRPIGTRYLTRPL

SEQ ID NO: 569 - DNA, 2208 bp, Artificial Sequence
  source: /note="Description of Artificial Sequence: Synthetic polynucleotide"
  modified_base (955)..(955): a, c, t, or g
  modified_base (971)..(972): a, c, t, or g
  modified_base (981)..(981): a, c, t, or g
  modified_base (986)..(986): a, c, t, or g
  modified_base (1235)..(1235): a, c, t, or g
  modified_base (1694)..(1696): a, c, t, or g
  modified_base (1698)..(1698): a, c, t, or g
  modified_base (1763)..(1765): a, c, t, or g
  modified_base (1778)..(1778): a, c, t, or g
  modified_base (2204)..(2204): a, c, t, or g
atggctgccgatggttatcttccagattggctcgaggacaacctctctgagggcattcgcgaatggtgggacttgaaacctggagccccgaaacccaaagtcaaccagcaaaagcaggacaacgctcggggtcttgtgcttccgggttacaaatacctcggacccttcaacggactcgacaagggggagcccgtcaacgcggcggacgcagcggccctcgagcacgacaaggcctacgaccagcagctcaaagcgggtgacaatccgtaccttcggtataaccacgccgacgccgagtttcaggagcgtctgcaagaagatacgtcttttgggggcaaccttggacgagcagtcttccaggccaagaagagggttctcgaaccttttggtctggttgaggaaggtgctaagacggctcctggaaagaaacgtccggtagagcagtcgccacaagagccagactcctcctcgggcattggcaagacaggccagcagcccgctaaaaagagactcaattttggtcagactggcgactcagagtcagtccccgacccacaacctctcggagaacctccagcaacccccgctgctgtgggacctactacaatggcttcaggcggtggcgcaccaatggcagacaataacgaaggcgccgacggagtgggtaatgcctcaggaaattggcattgcgattccacatggctgggcgacagagtcatcaccaccagcacccgaacatgggccttgcccacctataacaaccacctctacaagcaaatctccagtgcttcaacgggggccagcaacgacaaccactacttcggctacagcaccccctgggggtattttgatttcaacagattccactgccacttttcaccacgtgactggcagcgactcatcaataacaattggggattccggcccaagagactcaacttcaaactcttcaacntccaagtcaaggaggnnacgacgaangatgncgtcacaaccatcgctaataaccttaccagcacggttcaagtcttctcggactcggagtaccagcttccgtacgtcctcggctctgcgcaccagggctgcctccctccgttcccggcggacgtgttcatgattccgcaatacggctacctgacgctcaacaatggcagccaggcagtgggacggtcatccttttactgcctggaatatttcccatcgcagatgctgagaacgggcaataactttacctncagctacacttttgaggacgttcctttccacagcagctacgctcacagccagagcctggaccggctgatgaatcctctcatcgaccagtacctgtattacctgaacagaactcagaatcagtccggaagtgcccaaaacaaggacttgctgtttagccgtgggtctccaactggcatgtctgttcagcccaaaaactggctacctggaccctgttatcggcagcagcgcgtttctaaaacaaaaacagacaacaacaacagcaactttacctggactggtgcttcaaaatataaccttaatgggcgtgaatctataatcaaccctggcactgctatggcctcacacaaagacgacgaagacaagttctttcccatgagcggtgtcatgatttttggaaaggagagcgccggagcttcaaacactgcattggacaatgtcatgatcacagacgaagagannncnaagccactaaccccgtggccactgaaagatttgggactgtggcagtcaatctccaagcagcacannnaccctgcgaccgnagatgtgcatgccatgggagccttacctggaatggtgtggcaagacagagacgtatacctgcagggtcctatttgggccaaaattcctcacacggatggacactttcacccgtctcctctcatgggcggctttggacttaagcacccgcctcctcagatcctcatcaaaaacacgcctgttcctgcgaatcctccggcagagttttcggctacaaagtttgcttcattcatcacccagtattccacaggacaagtgagcgtggagattgaatgggagctgcagaaagaaaacagcaaacgctggaatcccgaagtgcagtatacatctaactatgcaaaatctgccaacgttgatttcactgtggacaacaatggactttatactgagcctcgccccattggcacccgttacctcacccgtccccngtaa

SEQ ID NO: 570 - protein, 723 aa, Artificial Sequence
  source: /note="Description of Artificial Sequence: Synthetic polypeptide"
MAADGYLPDWLEDNLSEGIREWWDLKPGAPKPKVNQQKQDNARGLVLPGYKYLGPFNGLDKGEPVNAADAAALEHDKAYDQQLKAGDNPYLRYNHADAEFQERLQEDTSFGGNLGRAVFQAKKRVLEPFGLVEEGAKTAPGKKRPVEQSPQEPDSSSGIGKTGQQPAKKRLNFGQTGDSESVPDPQPLGEPPATPAAVGPTTMASGGGAPMADNNEGADGVGNASGNWHCDSTWLGDRVITTSTRTWALPTYNNHLYKQISSASTGASNDNHYFGYSTPWGYFDFNRFHCHFSPRDWQRLINNNWGFRPKRLNFKLFNQVKETTDVTTIANNLTSTVQVFSDSEYQLPYVLGSAHQGCLPPFPADVFMIPQYGYLTLNNGSQAVGRSSFYCLEYFPSQMLRTGNNFTSYTFEDVPFHSSYAHSQSLDRLMNPLIDQYLYYLNRTQNQSGSAQNKDLLFSRGSPTGMSVQPKNWLPGPCYRQQRVSKTKTDNNNSNFTWTGASKYNLNGRESIINPGTAMASHKDDEDKFFPMSGVMIFGKESAGASNTALDNVMITDEEATNPVATERFGTVAVNLQSSPATDVHAMGALPGMVWQDRDVYLQGPIWAKIPHTDGHFHPSPLMGGFGLKHPPPQILIKNTPVPANPPAEFSATKFASFITQYSTGQVSVEIEWELQKENSKRWNPEVQYTSNYAKSANVDFTVDNNGLYTEPRPIGTRYLTRP

SEQ ID NO: 571 - DNA, 2208 bp, Artificial Sequence
  source: /note="Description of Artificial Sequence: Synthetic polynucleotide"
atggctgccgatggttatcttccagattggctcgaggacactctctctgaaggaataagacagtggtggaagctcaaacctggcccaccaccaccaaagcccgcagagcggcataaggacgacagcaggggtcttgtgcttcctgggtacaagtacctcggacccttcaacggactcgacaagggagagccggtcaacgaggcagacgccgcggccctcgagcacgacaaagcctatgaccggcagctcgacagcggagacaacccgtacctcaagtacaaccacgccgacgcggagtttcaggagcgccttaaagaagatacgtcttttgggggcaacctcggacgagcagtcttccaggcgaaaaagagggttcttgaacctctgggcctggttgaggaacctgttaagacggctccgggaaaaaagaggccggtagagcactctcctgtggagccagactcctcctcgggaaccggaaaggcgggtcagcagcctgcaagaaaaagattgaattttggtcagactggagacgcagactcagtacctgacccccagcctctcggacagccaccagcagccccctctggtctgggaactaatacgatggctacaggcagtggcgcaccaatggcagacaataacgagggcgccgacggagtgggtaattcctcgggaaattggcattgcgattccacatggatgggcgacagagtcatcaccaccagcacccgaacctgggccctgcccacctacaacaaccacctctacaaacaaatttccagccaatcaggagcctcgaacgacaatcactactttggctacagcaccccttgggggtattttgacttcaacagattccactgccacttttcaccacgtgactggcaaagactcatcaacaacaactggggattccgacccaagagactcaagttcaagctctttaacattcaagtcaaagaggtcacgcagaatgacggtacgacgacgattgccaataaccttaccagcacggttcaggtgtttactgactcggagtaccagctcccgtacgtcctcggctcggcgcatcaaggatgcctcccgccgttcccagcagacgtcttcatggtgccacagtatggatacctcaccctgaacaacgggagtcaggcagtaggacgctcttcattttactgcctggagtactttccttctcagatgctgcgtaccggtaacaactttaccttcagctacacttttgaggacgttcctttccacagcagctacgctcacagccagagtctggaccgtctcatgaatcctctcatcgaccagtacctgtattacttgagcagaacagacgctccaagtggaaccaccacgcagtcaaggcttcagttttctcaggccggagcgagtgacattcgggaccagtctaggaactggcttcctggaccctgttaccgccagcagcgagtatcaaagacatctgcggataacaacaacagtgaatactcgtggactggagctaccaagtaccacctcaatggcagagactctctggtgaatccgggcccggccatggcaagccacaaggacgatgaagaaaagttttttcctcagagcggggttctcatctttgggaagcaaggctcagagaaaacaagtgtggacattgaaaaggtcatgattacagacgaagaggaaatcaggacaaccaatcccgtggctacggagcagtatggttctgtatctaccaacctccagagaggcaacagacaagcagctaccgcagatgtcaacacacaaggcgttcttccaggcatggtctggcaggacagagatgtgtaccttcaggggcccatctgggcaaagattccacacacggacggacattttcacccctctcccctcatgggtggattcggacttaaacaccctcctccacagattctcatcaagaacaccccggtacctgcgaatccttcgaccaccttcagtgcggcaaagtttgcttccttcatcacacagtactccacgggacaggtcagcgtggagatcgagtgggagctgcagaaggaaaacagcaaacgctggaatcccgaagttcagtacacttccaactacaacaagtctgttaatgtggactttactgtggacactaatggcgtgtattcagagcctcgccccattggcaccagatacctgactcgtaatctgtaa

SEQ ID NO: 572 - protein, 735 aa, Artificial Sequence
  source: /note="Description of Artificial Sequence: Synthetic polypeptide"
MAADGYLPDWLEDTLSEGIRQWWKLKPGPPPPKPAERHKDDSRGLVLPGYKYLGPFNGLDKGEPVNEADAAALEHDKAYDRQLDSGDNPYLKYNHADAEFQERLKEDTSFGGNLGRAVFQAKKRVLEPLGLVEEPVKTAPGKKRPVEHSPVEPDSSSGTGKAGQQPARKRLNFGQTGDADSVPDPQPLGQPPAAPSGLGTNTMATGSGAPMADNNEGADGVGNSSGNWHCDSTWMGDRVITTSTRTWALPTYNNHLYKQISSQSGASNDNHYFGYSTPWGYFDFNRFHCHFSPRDWQRLINNNWGFRPKRLKFKLFNIQVKEVTQNDGTTTIANNLTSTVQVFTDSEYQLPYVLGSAHQGCLPPFPADVFMVPQYGYLTLNNGSQAVGRSSFYCLEYFPSQMLRTGNNFTFSYTFEDVPFHSSYAHSQSLDRLMNPLIDQYLYYLSRTDAPSGTTTQSRLQFSQAGASDIRDQSRNWLPGPCYRQQRVSKTSADNNNSEYSWTGATKYHLNGRDSLVNPGPAMASHKDDEEKFFPQSGVLIFGKQGSEKTSVDIEKVMITDEEEIRTTNPVATEQYGSVSTNLQRGNRQAATADVNTQGVLPGMVWQDRDVYLQGPIWAKIPHTDGHFHPSPLMGGFGLKHPPPQILIKNTPVPANPSTTFSAAKFASFITQYSTGQVSVEIEWELQKENSKRWNPEVQYTSNYNKSVNVDFTVDTNGVYSEPRPIGTRYLTRNL

SEQ ID NO: 573 - DNA, 2208 bp, Artificial Sequence
  source: /note="Description of Artificial Sequence: Synthetic polynucleotide"
atggctgccgatggttatcttccagattggctcgaggacactctctctgaaggaataagacagtggtggaagctcaaacctggcccaccaccaccaaagcccgcagagcggcataaggacgacagcaggggtcttgtgcttcctgggtacaagtacctcggacccttcaacggactcgacaagggagagccggtcaacgaggcagacgccgcggccctcgagcacgacaaagcctatgaccggcagctcgacagcggagacaacccgtacctcaagtacaaccacgccgacgcggagtttcaggagcgccttaaagaagatacgtcttttgggggcaacctcggacgagcagtcttccaggcgaaaaagagggttcttgaacctctgggcctggttgaggaacctgttaagacggctccgggaaaaaagaggccggtagagcactctcctgtggagccagactcctcctcgggaaccggaaaggcgggccagcagcctgcaagaaaaagattgaattttggtcagactggagacgcaaactcagtacctgacccccagcctctcggacagccaccagcagccccctctggtctgggaactaatacgatggctacaggcagtggcgcaccaatggcagacaataacgagggcgccgacggagtgggtaattcctcgggaaattggcattgcgattccacatggatgggcgacagagtcatcaccaccagcacccgaacctgggccctgcccacctacaacaaccacctctacaaacaaatttccagccaatcaggagcctcgaacgacaatcactactttggctacagcaccccttgggggtattttgacttcaacagattccactgccacttttcaccacgtgactggcaaagactcatcaacaacaactggggattccgacccaagagactcaagttcaagctctttaacattcaagtcaaagaggtcacgcagaatgacggtacgacgacgattgccaataaccttaccagcacggttcaggtgtttactgactcggagtaccagctcccgtacgtcctcggctcggcgcatcaaggatgcctcccgccgttcccagcagacgtcttcatggtgccacagtatggatacctcaccctgaacaacgggagtcgggcagtaggacgctcttcattttactgcctggagtactttccttctcagatgctgcgtaccggtaacaactttaccttcagctacacttttgaggacgttcctttccacagcagctacgctcacagccagagtctggaccgtctcatgaatcctctcatcgaccagtacctgtattacttgagcagaacagacactccaagtggaaccaccacgcagtcaaggcttcagttttctcaggccggagcgagtgacattcgggaccagtctaggaactggcttcctggaccctgttaccgccagcagcgagtatcaaagacatctgcggataacaacaacagtgaatactcgtggactggagctaccaagtaccacctcaatggcagagactctctggtgaatccgggcccggccatggcaagccacaaggacgatgaagaaaagttttttcctcagagcggggttctcatctttgggaagcaaggctcagagaaaacaagtgtggacattgaaaaggtcatgattacagacgaagaggaaatcaggacgaccaatcccgtggctacggagcagtatggttctgtatctaccaacctccagagaggcaacagacaagcagctaccgcagatgtcaacacacaaggcgttcttccaggcatggtctggcaggacagagatgtgtaccttcaggggcccatctgggcaaagattccacacacggacggacattttcacccctctcccctcatgggtggattcggacttaaacaccctcctccacagattctcatcaagaacaccccggtacctgcgaatccttcgaccaccttcagtgcggcaaagtttgcttccttcatcacacagtactccacgggacaggtcagcgtggagatcgagtgggagctgcagaaggaaaacagcaaacgctggaatcccgaagttcagtacacttccaactacaacaagtctgttaatgtggactttactgtggacactaatggcgtgtatacagagcctcgccccattggcaccagatacctgactcgtaatctgtaa

SEQ ID NO: 574 - protein, 735 aa, Artificial Sequence
  source: /note="Description of Artificial Sequence: Synthetic polypeptide"
MAADGYLPDWLEDTLSEGIRQWWKLKPGPPPPKPAERHKDDSRGLVLPGYKYLGPFNGLDKGEPVNEADAAALEHDKAYDRQLDSGDNPYLKYNHADAEFQERLKEDTSFGGNLGRAVFQAKKRVLEPLGLVEEPVKTAPGKKRPVEHSPVEPDSSSGTGKAGQQPARKRLNFGQTGDANSVPDPQPLGQPPAAPSGLGTNTMATGSGAPMADNNEGADGVGNSSGNWHCDSTWMGDRVITTSTRTWALPTYNNHLYKQISSQSGASNDNHYFGYSTPWGYFDFNRFHCHFSPRDWQRLINNNWGFRPKRLKFKLFNIQVKEVTQNDGTTTIANNLTSTVQVFTDSEYQLPYVLGSAHQGCLPPFPADVFMVPQYGYLTLNNGSRAVGRSSFYCLEYFPSQMLRTGNNFTFSYTFEDVPFHSSYAHSQSLDRLMNPLIDQYLYYLSRTDTPSGTTTQSRLQFSQAGASDIRDQSRNWLPGPCYRQQRVSKTSADNNNSEYSWTGATKYHLNGRDSLVNPGPAMASHKDDEEKFFPQSGVLIFGKQGSEKTSVDIEKVMITDEEEIRTTNPVATEQYGSVSTNLQRGNRQAATADVNTQGVLPGMVWQDRDVYLQGPIWAKIPHTDGHFHPSPLMGGFGLKHPPPQILIKNTPVPANPSTTFSAAKFASFITQYSTGQVSVEIEWELQKENSKRWNPEVQYTSNYNKSVNVDFTVDTNGVYTEPRPIGTRYLTRNL

SEQ ID NO: 575 - DNA, 2211 bp, Artificial Sequence
  source: /note="Description of Artificial Sequence: Synthetic polynucleotide"
atggctgccgatggttatcttccagattggctcgaggacactctctctgaaggaataagacagtggtggaagctcaaacctggcccaccaccaccaaagcccgcagagcggcataaggacgacagcaggggtcttgtgcttcctgggtacaagtacctcggacccttcaacggactcgacaagggagagccggtcaacgaggcagacgccgcggccctcgagcacgacaaggcctacgaccagcagctcaaagcgggtgacaatccgtacctgcggtataaccacgccgacgccgagtttcaggagcgtctgcaagaagatacgtcttttgggggcaacctcgggcgagcagtcttccaggccaagaagcgggttctcgaacctctcggtctggttgaggaaggcgctaagacggctcctggaaagaaacgtccggtagagcagtcgccacaagagccagactcctcctcgggcatcggcaagacaggccagcagcccgctaaaaagagactcaattttggtcagactggcgactcagagtcagtccccgacccacaacctctcggagaacctccagcaacccccgctgctgtgggacctactacaatggcttcaggcggtggcgcaccaatggcagacaataacgaaggcgccgacggagtgggtaatgcctcaggaaattggcattgcgattccacatggctgggcgacagagtcatcaccaccagcacccgaacatgggccttgcccacctataacaaccacctctacaagcaaatctccagtgcttcgacgggggccagcaacgacaaccactacttcggctacagcaccccctgggggtattttgactttaacagattccactgccacttttcaccacgtgactggcagcgactcatcaacaataactggggattccggcccaagagactcagcttcaagctcttcaacatccaggtcaaggaggtcacgacgaatgatggcgtcacaaccatcgctaataaccttaccagcacggttcaagtcttctcggactcggagtaccagcttccgtacgtcctcggctctgcgcaccagggctgcctccctccgttcccggcggacgtgttcatgattccgcaatacggctacctgacgctcaacaatggcagccaagccgtgggacgttcatccttttactgcctggaatatttcccttctcagatgctgagaacgggcaacaactttaccttcagctacacctttgaggaagtgcctttccacagcagctacgcgcacagccagagcctggaccggctgatgaatcctctcatcgatcaatacctgtattacctgaacagaactcaaaatcagtccggaagtgcccaaaacaaggacttgctgtttagccgtgggtctccagctggcatgtctgttcagcccaaaaactggctacctggaccctgttatcggcagcagcgcgtttctaaaacaaaaacagacaacaacaacagcaattttacctggactggtgcttcaaaatataacctcaatgggcgtgaatccatcatcaaccctggcactgctatggcctcacacaaagacgacgaagacaagttctttcccatgagcggtgtcatgatttttggaaaagagagcgccggagcttcaaacactgcattggacaatgtcatgattacggacgaagaggaaattaaagccactaaccctgtggccaccgaaagatttgggaccgtggcagtcaatttccagagcagcagcacagaccctgcgaccggagatgtgcatgctatgggagcattacctggcatggtgtggcaagatagagacgtgtacctgcagggtcccatttgggccaaaattcctcacacagatggacactttcacccgtctcctcttatgggcggctttggactcaagaacccgcctcctcagatcctcatcaaaaacacgcctgttcctgcgaatcctccggcggagttttcagctacaaagtttgcttcattcatcactcaatactccacaggacaagtgagcgtggaaattgaatgggagctgcagaaagaaaacagcaaacgctggaatcccgaagtgcagtatacatctaactatgcaaaatctgccaacgttgatttcactgtggacaacaatggactttatactgagcctcgccccattggcacccgttacctcacccgtcccctgtaa

SEQ ID NO: 576 - protein, 736 aa, Artificial Sequence
  source: /note="Description of Artificial Sequence: Synthetic polypeptide"
MAADGYLPDWLEDTLSEGIRQWWKLKPGPPPPKPAERHKDDSRGLVLPGYKYLGPFNGLDKGEPVNEADAAALEHDKAYDQQLKAGDNPYLRYNHADAEFQERLQEDTSFGGNLGRAVFQAKKRVLEPLGLVEEGAKTAPGKKRPVEQSPQEPDSSSGIGKTGQQPAKKRLNFGQTGDSESVPDPQPLGEPPATPAAVGPTTMASGGGAPMADNNEGADGVGNASGNWHCDSTWLGDRVITTSTRTWALPTYNNHLYKQISSASTGASNDNHYFGYSTPWGYFDFNRFHCHFSPRDWQRLINNNWGFRPKRLSFKLFNIQVKEVTTNDGVTTIANNLTSTVQVFSDSEYQLPYVLGSAHQGCLPPFPADVFMIPQYGYLTLNNGSQAVGRSSFYCLEYFPSQMLRTGNNFTFSYTFEEVPFHSSYAHSQSLDRLMNPLIDQYLYYLNRTQNQSGSAQNKDLLFSRGSPAGMSVQPKNWLPGPCYRQQRVSKTKTDNNNSNFTWTGASKYNLNGRESIINPGTAMASHKDDEDKFFPMSGVMIFGKESAGASNTALDNVMITDEEEIKATNPVATERFGTVAVNFQSSSTDPATGDVHAMGALPGMVWQDRDVYLQGPIWAKIPHTDGHFHPSPLMGGFGLKNPPPQILIKNTPVPANPPAEFSATKFASFITQYSTGQVSVEIEWELQKENSKRWNPEVQYTSNYAKSANVDFTVDNNGLYTEPRPIGTRYLTRPL

SEQ ID NO: 577 - protein, 735 aa, Artificial Sequence
  source: /note="Description of Artificial Sequence: Synthetic polypeptide"
MAADGYLPDWLEDTLSEGIRQWWKLKPGPPPPKPAERHKDDSRGLVLPGYKYLGPFNGLDKGEPVNEADAAALEHDKAYDRQLDSGDNPYLKYNHADAEFQERLKEDTSFGGNLGRAVFQAKKRVLEPLGLVEEPVKTAPGKKRPVEHSPVEPDSSSGTGKAGQQPARKRLNFGQTGDADSVPDPQPLGQPPAAPSGLGTNTMATGSGAPMADNNEGADGVGNSSGNWHCDSTWMGDRVITTSTRTWALPTYNNHLYKQISSQSGASNDNHYFGYSTPWGYFDFNRFHCHFSPRDWQRLINNNWGFRPKRLKFKLFNIQVKEVTQNDGTTTIANNLTSTVQVFTDSEYQLPYVLGSAHQGCLPPFPADVFMVPQYGYLTLNNGSQAVGRSSFYCLEYFPSQMLRTGNNFTFSYTFEDVPFHSSYAHSQSLDRLMNPLIDQYLYYLSRTDTPSGTTTQSRLQFSQAGASDIRNQSRNWLPGPCYRQQRVSKTSADNNNSEYSWTGATKYHLNGRDSLVNPGPAMASHKDDEEKFFPQSGVLIFGKQGSEKTSVDIEKVMITDEEEIRTTNPVATEQYGSVSTNLQRGNRQAATADVNTQGVLPGMVWQDRDVYLQGPIWAKIPHTDGHFHPSPLMGGFGLKHPPPQILIKNTPVPANPSTTFSAAKFASFITQYSTGQVSVEIEWELQKENSKRWNPEVQYTSNYNKSVNVDFTVDTNGVYSEPRPIGTRYLTRNQ

SEQ ID NO: 578 - DNA, 2208 bp, Artificial Sequence
  source: /note="Description of Artificial Sequence: Synthetic polynucleotide"
atggctgccgatggttatcttccagattggctcgaggacactctctctgaaggaataagacagtggtggaagctcaaacctggcccaccaccaccaaagcccgcagagcggcataaggacgacagcaggggtcttgtgcttcctgggtacaagtacctcggacccttcaacggactcgacaagggagagccggtcaacgaggcagacgccgcggccctcgagcacgacaaagcctatgaccggcagctcgacagcggagacaacccgtacctcaagtacaaccacgccgacgcggagtttcaggaacgccttaaagaagatacgtcttttgggggcaacctcggacgagcagtcttccaggcgaaaaagagggttcttgaacctctgggcctggttgaggaacctgttaagacggctccgggaaaaaagaggccggtagagcactctcctgtggagccagactcctcctcgggaaccggaaaggcgggccagcagcctgcaagaaaaagattgaattttggtcagactggagacgcagactcagtacctgacccccagcctctcggacagccaccagcagccccctctggtctgggaactaatacgatggctacaggcagtggcgcaccaatggcagacaataacgagggcgccgacggagtgggtaattcctcgggaaattggcattgcgattccacatggatgggcgacagagtcatcaccaccagcacccgaacctgggccctgcccacctacaacaaccacctctacaaacaaatttccagccaatcaggagcctcgaacgacaatcactactttggctacagcaccccttgggggtattttgacttcaacagattccactgccacttttcaccacgtgactggcaaagactcatcaacaacaactggggattccgacccaagagactcaagttcaagctctttaacattcaagtcaaagaggtcacgcagaatgacggtacgacgacgattgccaataaccttaccagcacggttcaggtgtttactgactcggagtaccagctcccgtacgtcctcggctcggcgcatcaaggatgcctcccgccgttcccagcagacgtcttcatggtgccacagtatggatacctcaccctgaacaacgggagtcaggcagtaggacgctcttcattttactgcctggagtactttccttctcagatgctgcgtaccggtaacaactttaccttcagctacacttttgaggacgttcctttccacagcagctacgctcacagccagagtctggaccgtctcatgaatcctctcatcgaccagtacctgtattacttgagcagaacagacactccaagtggaaccaccacgcagtcaaggcttcagttttctcaggccggagcgagtgacattcggaaccagtctaggaactggcttcctggaccctgttaccgccagcagcgagtatcaaagacatctgcggataacaacaacagtgaatactcgtggactggagctaccaagtaccacctcaatggcagagactctctggtgaatccgggcccggccatggcaagccacaaggacgatgaagaaaagttttttcctcagagcggggttctcatctttgggaagcaaggctcagagaaaacaagtgtggacattgaaaaggtcatgattacagacgaagaggaaatcaggacaaccaatcccgtggctacggagcagtatggttctgtatctaccaacctccagagaggcaacagacaagcagctaccgcagatgtcaacacacaaggcgttcttccaggcatggtctggcaggacagagatgtgtaccttcaggggcccatctgggcaaagattccacacacggacggacattttcacccctctcccctcatgggtggattcggacttaaacaccctcctccacagattctcatcaagaacaccccggtacctgcgaatccttcgaccaccttcagtgcggcaaagtttgcttccttcatcacacagtactccacgggacaggtcagcgtggagatcgagtgggagctgcagaaggaaaacagcaaacgctggaatcccgaagttcagtacacttccaactacaacaagtctgttaatgtggactttactgtggacactaatggcgtgtattcagagcctcgccccattggcaccagatacctgactcgtaatcagtaa

SEQ ID NO: 579 - DNA, 2208 bp, Artificial Sequence
  source: /note="Description of Artificial Sequence: Synthetic polynucleotide"
atggctgccgatggttatcttccagattggctcgaggacactctctctgaaggaataagacagtggtggaagctcaaacctggcccaccaccaccaaagcccgcagagcggcataaggacgacagcaggggtcttgtgcttcctgggtacaagtacctcggacccttcaacggactcgacaagggagagccggtcaacgaggcagacgccgcggccctcgagcacgacaaagcctatgaccggcagctcgacagcggagacaacccgtacctcaagtacaaccacgccgacgcggagtttcaggagcgccttaaagaagatacgtcttttgggggcaacctcggacgagcagtcttccaggcgaaaaagagggttcttgaacctctgggcctggttgaggaacctgttaagacggctccgggaaaaaagaggccggtagagcactctcctgtggagccagactcctcctcgggaaccggaaaggcgggccagcagcctgcaagaaaaagattgaattttggtcagactggagacgcagactcagtacctgatccccagcctctcggacagccaccagcagccccctctggtctgggaactaatacgatggctacaggcagtggcgcaccaatggcagacaataacgagggcgccgacggagtgggtaattcctcgggaaattggcattgcgattccacatggatgggcgacagagtcatcaccaccagcacccgaacctgggccctgcccacctacaacaaccacctctacaaacaaatttccagccaatcaggagcctcgaacgacaatcactactttggctacagcaccccttgggggtattttgacttcaacagattccactgccacttttcaccacgtgactggcaaagactcatcaacaacaactggggattccgacccaagagactcaagttcaagctctttaacattcaagtcaaagaggtcacgcagaatgacggtacgacgacgattgccaataaccttaccagcacggttcaggtgtttactgactcggagtaccagctcccgtatgtcctcggctcggcgcatcaaggatgcctcccgccgttcccagcagacgtcttcatggtgccacagtatggatacctcaccctgaacaacgggagtcaggcagtaggacgctcttcattttactgcctggagtactttccttctcagatgctgcgtaccggtaacaactttaccttcagctacacttttgaggacgttcctttccacagcagctacgctcacagccagagtctggaccgtctcatgaatcctctcatcgaccagtacctgtattacttgagcagaacagacactccaagtggaaccaccacgcagtcaaggcttcagttttctcaggccggagcgagtgacattcgggaccagtctaggaactggcttcctggaccctgttaccgccagcagcgagtatcaaagacatctgcggataacaacaacagtgaatactcgtggactggagctaccaagtaccacctcaatggcagagactctctggtgaatccgggcccggccatggcaagccacaaggacgatgaagaaaagttttttcctcagagcggggttctcatctttgggaagcaaggctcagagaaaacaagtgtggacattgaaaaggtcatgattacagacgaagaggaaatcaggacaaccaatcccgtggctacggagcagtatggttctgtatctaccaacctccagagaggcaacagacaagcagctaccgcagatgtcaacacacaaggcgttcttccaggcatggtctggcaggacagagatgtgtaccttcaggggcccatctgggcaaagattccacacacggacggacattttcacccctctcccctcatgggtggattcggacttaaacaccctcctccacagattctcatcaagaacaccccggtacctgcgaatccttcgaccaccttcagtgcggcaaagtttgcttccttcatcacacagtactccacgggacaggtcagcgtggagatcgagtgggagctgcagaaggaaaacagcaaacgctggaatcccgaagttcagtacacttccaactacaacaagtctgttaatgtggactttactgtggacactaatggcgtgtattcagagcctcgccccattggcaccagatacctgactcgtaatctgtaa

SEQ ID NO: 580 - protein, 735 aa, Artificial Sequence
  source: /note="Description of Artificial Sequence: Synthetic polypeptide"
MAADGYLPDWLEDTLSEGIRQWWKLKPGPPPPKPAERHKDDSRGLVLPGYKYLGPFNGLDKGEPVNEADAAALEHDKAYDRQLDSGDNPYLKYNHADAEFQERLKEDTSFGGNLGRAVFQAKKRVLEPLGLVEEPVKTAPGKKRPVEHSPVEPDSSSGTGKAGQQPARKRLNFGQTGDADSVPDPQPLGQPPAAPSGLGTNTMATGSGAPMADNNEGADGVGNSSGNWHCDSTWMGDRVITTSTRTWALPTYNNHLYKQISSQSGASNDNHYFGYSTPWGYFDFNRFHCHFSPRDWQRLINNNWGFRPKRLKFKLFNIQVKEVTQNDGTTTIANNLTSTVQVFTDSEYQLPYVLGSAHQGCLPPFPADVFMVPQYGYLTLNNGSQAVGRSSFYCLEYFPSQMLRTGNNFTFSYTFEDVPFHSSYAHSQSLDRLMNPLIDQYLYYLSRTDTPSGTTTQSRLQFSQAGASDIRDQSRNWLPGPCYRQQRVSKTSADNNNSEYSWTGATKYHLNGRDSLVNPGPAMASHKDDEEKFFPQSGVLIFGKQGSEKTSVDIEKVMITDEEEIRTTNPVATEQYGSVSTNLQRGNRQAATADVNTQGVLPGMVWQDRDVYLQGPIWAKIPHTDGHFHPSPLMGGFGLKHPPPQILIKNTPVPANPSTTFSAAKFASFITQYSTGQVSVEIEWELQKENSKRWNPEVQYTSNYNKSVNVDFTVDTNGVYSEPRPIGTRYLTRNL

SEQ ID NO: 581 - DNA, 2601 bp, Artificial Sequence
  source: /note="Description of Artificial Sequence: Synthetic polynucleotide"
ccatcgacgtcagacgcggaagcttcgatcaactacgcggacaggtaccaaaacaaatgttctcgtcacgtgggcatgaatctgatgctgtttccctgcagacaatgcgagagactgaatcagaattcaaatatctgcttcactcacggtgtcaaagactgtttagagtgctttcccgtgtcagaatctcaacccgtttctgtcgtcaaaaaggcgtatcagaaactgtgctacattcatcacatcatgggaaaggtgccagacgcttgcactgcttgcgacctggtcaatgtggacttggatgactgtgtttctgaacaataaatgacttaaaccaggtatgactgccgatggttatcttccagattggctcgaggacaaccttagtgaaggaattcgcgagtggtgggctttgaaacctggagcccctcaacccaaggcaaatcaacaacatcaagacaacgctcgaggtcttgtgcttccgggttacaaataccttggacccggcaacggactcgacaagggggagccggtcaacgcagcagacgcggcggccctcgagcacgacaaggcctacgaccagcagctcaaggccggagacaacccgtacctcaagtacaaccacgccgacgccgagttccaggagcggctcaaagaagatacgtcttttgggggcaacctcgggcgagcagtcttccaggccaaaaagaggcttcttgaacctcttggtctggttgaggaagcggctaagacggctcctggaaagaagaggcctgtagagcagtctcctcaggaaccggactcctccgcgggtattggcaaatcgggtgcacagcccgctaaaaagagactcaatttcggtcagactggcgacacagagtcagtcccagaccctcaaccaatcggagaacctcccgcagccccctcaggtgtgggatctcttacaatggcttcaggtggtggcgcaccagtggcagacaataacgaaggtgccgatggagtgggtagttcctcgggaaattggcattgcgattcccaatggctgggggacagagtcatcaccaccagcacccgaacctgggccctgcccacctacaacaatcacctctacaagcaaatctccaacagcacatctggaggatcttcaaatgacaacgcctacttcggctacagcaccccctgggggtattttgacttcaacagattccactgccacttctcaccacgtgactggcagcgactcatcaacaacaactggggattccggcctaagcaactcaacttcaagctcttcaacattcaggtcaaagaggttacggacaacaatggagtcaagaccatcgccaataaccttaccagcacggtccaggtcttcacggactcagactatcagctcccgtacgtgctcgggtcggctcacgagggctgcctcccgccgttcccagcggacgttttcatgattcctcagtacgggtatctgacgcttaatgatggaagccaggccgtgggtcgttcgtccttttactgcctggaatatttcccgtcgcaaatgctaagaacgggtaacaacttccagttcagctacgagtttgagaacgtacctttccatagcagctacgctcacagccaaagcctggaccgactaatgaatccactcatcgaccaatacttgtactatctctcaaagactattaacggttctggacagaatcaacaaacgctaaaattcagtgtggccggacccagcaacatggctgtccagggaagaaactacatacctggacccagctaccgacaacaacgtgtctcaaccactgtgactcaaaacaacaacagcgaatttgcttggcctggagcttcttcttgggctctcaatggacgtaatagcttgatgaatcctggacctgctatggccagccacaaagaaggagaggaccgtttctttcctttgtctggatctttaatttttggcaaacaaggaactggaagagacaacgtggatgcggacaaagtcatgataaccaacgaagaagaaattaaaactactaacccggtagcaacggagtcctatggacaagtggccacaaaccaccagagtgcccaagcacaggcgcagaccggctgggttcaaaaccaaggaatacttccgggtatggtttggcaggacagagatgtgtacctgcaaggacccatttgggccaaaattcctcacacggacggcaactttcacccttctccgctgatgggagggtttggaatgaagcacccgcctcctcagatcctcatcaaaaacacacctgtacctgcggatcctccaacggccttcaacaaggacaagctgaactctttcatcacccagtattctactggccaagtcagcgtggagatcgagtgggagctgcagaaggaaaacagcaagcgctggaacccggagatccagtacacttccaactattacaagtctaataatgttgaatttgctgttaatactgaaggtgtatatagtgaaccccgccccattggcaccagatacctgactcgtaatctgtaattgcttgttaatcaataaaccgtttaattcgtttcagttgaactgcggcc

SEQ ID NO: 582 - DNA, 2601 bp, Artificial Sequence
  source: /note="Description of Artificial Sequence: Synthetic polynucleotide"
ccatcgacgtcagacgcggaagcttcgatcaactacgcggacaggtaccaaaacaaatgttctcgtcacgtgggcatgaatctgatgctgtttccctgcagacaatgcgagagactgaatcagaattcaaatatctgcttcactcacggtgtcaaagactgtttagagtgctttcccgtgtcagaatctcaacccgtttctgtcgtcaaaaaggcgtatcagaaactgtgctacattcatcacatcatgggaaaggtgccagacgcttgcactgcttgcgacctggtcaatgtggacttggatgactgtgtttctgaacaataaatgacttaaaccaggtatggctgccgatggttatcttccagattggctcgaggacaaccttagtgaaggaattcgcgagtggtgggctttgaaacctggagcccctcaacccaaggcaaatcaacaacatcaagacaacgctcgaggtcttgtgcttccgggttacaaataccttggacccggcaacggactcgacaagggggagccggtcaacgcagcagacgcggcggccctcgagcacgacaaggcctacgaccagcagctcaaggccggagacaacccgtacctcaagtacaaccacgccgacgccgagttccaggagcggctcaaagaagatacgtcttttgggggcaacctcgggcgagcagtcttccaggccaaaaagaggcttcttgaacctcttggtctggttgaggaagcggctaagacggctcctggaaagaagaggcctgtagagcagtctcctcaggaaccggactcctccgcgggtattggcaaatcgggtgcacagcccgctaaaaagagactcaatttcggtcagactggcgacacagagtcagtcccagaccctcaaccaatcggagaacctcccgcagccccctcaggtgtgggatctcttacaatggcttcaggtggtggcgcaccagtggcagacaataacgaaggtgccgatggagtgggtagttcctcgggaaattggcattgcgattcccaatggctgggggacagagtcatcaccaccagcacccgaacctgggccctgcccacctacaacaatcacctctacaagcaaatctccaacagcacatctggaggatcttcaaatgacaacgcctacttcggctacagcaccccctgggggtattttgacttcaacagattccactgccacttctcaccacgtgactggcagcgactcatcaacaacaactggggattccggcctaagcgactcaacttcaagctcttcaacattcaggtcaaagaggttacggacaacaatggagtcaagaccatcgccaataaccttaccagcacggtccaggtcttcacggactcagactatcagctcccgtacgtgctcgggtcggctcacgagggctgcctcccgccgttcccagcggacgttttcatgattcctcagtacgggtatctgacgcttaatgatggaagccaggccgtgggtcgttcgtccttttactgcctggaatatttcccgtcgcaaatgctaagaacgggtaacaacttccagttcagctacgagtttgagaacgtacctttccatagcagctacgctcacagccaaagcctggaccgactaatgaatccactcatcgaccaatacttgtactatctctcaaagactattaacggttctggacagaatcaacaaacgctaaaattcagtgtggccggacccagcaacatggctgtccagggaagaaactacatacctggacccagctaccgacaacaacgtgtctcaaccactgtgactcaaaacaacaacagcgaatttgcttggcctggggcttcttcttgggctctcaatggacgtaatagcttgatgaatcctggacctgctatggccagccacaaagaaggagaggaccgtttctttcctttgtctggatctttaatttttggcaaacaaggaactggaagagacaacgtggatgcggacaaagtcatgataaccaacgaagaagaaattaaaactactaacccggtagcaacggagtcctatggacaagtggccacaaaccaccagagtgcccaagcacaggcgcagaccggctgggttcaaaaccaaggaatacttccgggtatggtttggcaggacagagatgtgtacctgcaaggacccatttgggccaaaattcctcacacgggcggcaactttcacccttctccgctgatgggagggtttggaatgaagcacccgcctcctcagatcctcatcaaaaacacacctgtacctgcggatcctccaacggccttcaacaaggacaagctgaactctttcatcacccagtattctactggccaagtcagcgtggagatcgagtgggagctgcagaaggaaaacagcaagcgctggaacccggagatccagtacacttccaactattacaagtctaataatgttgaatttgctgttaatactggaggtgtatatagtgaaccccgccccattggcaccagatacctgactcgtaatctgtaattgcttgttaatcaataaaccgtttaattcgtttcagttgaactgcggcc

SEQ ID NO: 583 - DNA, 2601 bp, Artificial Sequence
  source: /note="Description of Artificial Sequence: Synthetic polynucleotide"
ccatcgacgtcagacgcggaagcttcgatcaactacgcggacaggtaccaaaacaaatgttctcgtcacgtgggcatgaatctgatgctgtttccctgcagacaatgcgagagactgaatcagaattcaaatatctgcttcactcacggtgtcaaagactgtttagagtgctttcccgtgtcagaatctcaacccgtttctgtcgtcaaaaaggcgtatcagaaactgtgctacattcatcacatcatgggaaaggtgccagacgcttgcactgcttgcgacctggtcaatgtggactcggatgactgtgtttctgaacaataaatgacttaaaccaggtatggctgccgatggttatcttccagattggctcgaggacaaccttagtgaaggaattcgcgagtggtgggctttgaaacctggagcccctcaacccaaggcaaatcaacaacatcaagacaacgctcgaggtcttgtgcttccgggttacaaataccttggacccggcaacggactcgacaagggggagccggtcaacgcagcagacgcggcggccctcgagcacgacaaggcctacgaccagcagctcaaggccggagacaacccgtacctcaagtacaaccacgccgacgccgagttccaggagcggctcaaagaagatacgtcttttgggggcaacctcgggcgagcagtcttccaggccaaaaagaggcttcttgaacctcttggtctggttgaggaagcggctaagacggctcctggaaagaagaggcctgtagagcagtctcctcaggaaccggactcctccgcgggtattgacaaatcgggtgcacagcccgctaaaaagagactcaatttcggtcagactggcgacacagagtcagtcccagaccctcaaccaatcggagaacctcccgcagccccctcaggtgtgggatctcttacaatggcttcaggtggtggcgcaccagtggcagacaataacgaaggtgccgatggagtgggtagttcctcgggaaattggcattgcgattcccaatggctgggggacagagtcatcaccaccagcacccgaacctgggccctgcccacctacaacaatcacctctacaagcaaatctccaacagcacatctggaggatcttcaaatgacaacgcctacttcggctacagcaccccctgggggtattttgacttcaacagattccactgccacttctcaccacgtgactggcagcgactcatcaacaacaactggggattccggcctaagcgactcaacttcaagctcttcaacattcaggtcaaagaggttacggacaacaatggagtcaagaccatcgccaataaccttaccagcacggtccaggtcttcacggactcggactatcagctcccgtacgtgctcgggtcggctcacgagggctgcctcccgccgttcccagcggacgttttcatgattcctcagtacgggtatctgacgcttaatgatggaagccaggccgtgggtcgttcgtccttttactgcctggaatatttcccgtcgcaaatgctaagaacgggtaacaacttccagttcagctacgagtttgagaacgtacctttccatagcagctacgctcacagccaaagcctggaccgactaatgaatccactcatcgaccaatacttgtactatctctcaaagactattaacggttctggacagaatcaacaaacgctaaaattcagtgtggccggacccagcaacatggctgtccagggaagaaactacatacctggacccagctaccgacaacaacgtgtctcaaccactgtgactcaaaacaacaacagcgaatttgcttggcctggagcttcttcttgggctctcaatggacgtaatagcttgatgaatcctggacctgctatggccagccacaaagaaggagaggaccgtttctttcctttgtctggatctttaatttttggcaaacaaggaactggaagagacaacgtggatgcggacaaagtcatgataaccaacgaagaagaaattaaaactactaacccggtagcaacggagtcctatggacaagtggccacaaaccaccagagtgcccaagcacaggcgcagaccggctgggttcaaaaccaaggaatacttccgggtatggtttggcaggacagagatgtgtacctgcaaggacccatttgggccaaaattcctcacacggacggcaactttcacccttctccgctgatgggagggtttggaatgaagcacccgcctcctcagatcctcatcaaaaacacacctgtacctgcggatcctccaacggccttcaacaaggacaagctgaactctttcatcacccagtattctactggccaagtcagcgtggagatcgagtgggagctgcagaaggaaaacagcaagcgctggaacccggagatccagtacacttccaactattacaagtctaataatgttgaatttgctgttaatactgaaggtgtatatagtgaaccccgccccattggcaccagatacctgactcgtaatctgtaattgcttgttaatcaataaaccgtttaattcgtttcagttgaactgcggcc

SEQ ID NO: 584 - DNA, 2601 bp, Artificial Sequence
  source: /note="Description of Artificial Sequence: Synthetic polynucleotide"
ccatcgacgtcagacgcggaagcttcgatcaactacgcggacaggtaccaaaacaaatgttctcgtcacgtgggcatgaatctgatgctgtttccctgcagacaatgcgagagactgaatcagaattcaaatatctgcttcactcacggtgtcaaagactgtttagagtgctttcccgtgtcagaatctcaacccgtttctgtcgtcaaaaaggcgtatcagaaactgtgctacattcatcacatcatgggaaaggtgccagacgcttgcactgcttgcgacctggtcaatgtggacttggatgactgtgtttctgaacaataaatgacttaaaccaggtatggctgccgatggttatcttccagattggctcgaggacaaccttagtgaaggaattcgcgagtggtgggctttgaaacctggagcccctcaacccaaggcaaatcaacaacatcaagacaacgctcgaggtcttgtgcttccgggttacaaataccttggacccggcaacggactcgacaagggggagccggtcaacgcagcagacgcggcggccctcgagcacgacaaggcctacgaccagcagctcaaggccggagacaacccgtacctcaagtacaaccacgccgacgccgagttccaggagcggctcaaagaagatacgtcttttgggggcaacctcgggcgagcagtcctccaggccaaaaagaggcttcttgaacctcttggtctggttgaggaagcggctaagacggctcctggaaagaagaggcctgtagagcagtctcctcaggaaccggactcctccgcgggtattggcaaatcgggtgcacagcccgctaaaaagagactcaatttcggtcagactggcgacacagagtcagtcccagaccctcaaccaatcggagaacctcccgcagccccctcaggtgtgggatctcttacaatggcttcaggtggtggcgcaccagtggcagacaataacgaaggtgccgatggagtgggtagttcctcgggaaattggcattgcgattcccaatggctgggggacagagtcatcaccaccagcacccgaacctgggccctgcccacctacaacaatcacctctacaagcaaatctccaacagcacatctggaggatcttcaaatgacaacgcctacttcggctacagcaccccctgggggtattttgacttcaacagattccactgccacttctcaccacgtgactggcagcgactcatcaacaacaactggggattccggcctaagcgactcaacttcaagctcttcaacattcaggtcaaagaggttacggacaacaatggagtcaagaccatcgccaataaccttaccagcacggtccaggtcttcacggactcagactatcagctcccgtacgtgctcgggtcggctcacgagggctgcctcccgccgttcccagcggacgttttcatgattcctcagtacgggtatctgacgcttaatgatggaagccaggccgtgggtcgttcgtccttttactgcctggaatatttcccgtcgcaaatgctaagaacgggtaacaacttccagttcagctacgagtttgagaacgtacctttccatagcagctacgctcacagccaaagcctggaccgactaatgaatccactcatcgaccaatacttgtactatctctcaaagactattaacggttctggacagaatcaacaaacgctaaaattcagtgtggccggatccagcaacatggctgtccagggaagaaactacatacctggacccagctaccgacaacaacgtgtctcaaccactgtgactcaaaacaacaacagcgaatttgcttggcctggagcttcttcttgggctctcaatggacgtaatagcttgatgaatcctggacctgctatggccagccacaaagaaggagaggaccgtttctttcctttgtctggatctttaatttttggcaaacaaggaactggaagagacaacgtggatgcggacaaagtcatgataaccaacgaagaagaaattaaaactactaacccggtagcaacggagtcctatggacaagtggccacaaaccaccagagtgcccaagcacaggcgcagaccggctgggttcaaaaccaaggaatacttccaggtatggtttggcaggacagagatgtgtacctgcaaggacccatttgggccaaaattcctcacacggacggcaactttcacccttctccgctgatgggagggtttggaatgaagcacccgcctcctcagatcctcatcaaaaacacacctgtacctgcggatcctccaacggccttcaacaaggacaagctgaactctttcatcacccagtattctactggccaagtcagcgtggagatcgagtgggagctgcagaaggaaaacagcaagcgctggaacccggagatccagtacacttccaactattacaagtctaataatgttgaatttgctgttaatactgaaggtgtatatagtgaaccccgccccattggcaccagatacctgactcgtaatctgtaattgcttgttaatcaataaaccgtttaattcgtttcagttgaactgcggcc

SEQ ID NO: 585 - DNA, 2601 bp, Artificial Sequence
  source: /note="Description of Artificial Sequence: Synthetic polynucleotide"
ccatcgacgtcagacgcggaagcttcgatcaactacgcggacaggtaccaaaacaaatgttctcgtcacgtgggcatgaatctgatgctgtttccctgcagacaatgcgagagactgaatcagaattcaaatatctgcttcactcacggtgtcaaagactgtttagagtgctttcccgtgtcagaatctcaacccgtttctgtcgtcaaaaaggcgtatcagaaactgtgctacattcatcacatcatgggaaaggtgccagacgcttgcactgcttgcgacctggtcaatgtggacttggatgactgtgtttctgaacaataaatgacttaaaccaggtatggctgccgatggttatcttccagattggctcgaggacaaccttagtgaaggaattcgcgagtggtgggctttgaaacctggagcccctcaacccaaggcaaatcaacaacatcaagacaacgctcgaggtcttgtgcttccgggttacaaataccttggacccggcaacggactcgacaagggggagccggtcaacgcagcagacgcggcggccctcgagcacgacagggcctacgaccagcagctcaaggccggagacaacccgtacctcaagtacaaccacgccgacgccgagttccaggagcggctcaaagaagatacgtcttttgggggcaacctcgggcgagcagtcttccaggccaaaaagaggcttcttgaacctcttggtctggttgaggaagcggctaagacggctcctggaaagaagaggcctgtagagcagtctcctcaggaaccggactcctccgcgggtattggcaaatcgggtgcacagcccgctaaaaagagactcaatttcggtcagactggcgacacagagtcagtcccagaccctcaaccaatcggagaacctcccgcagccccctcaggtgtgggatctcttacaatggcttcaggtggtggcgcaccagtggcagacaataacgaaggtgccgatggagtgggtagttcctcgggaaattggcattgcgattcccaatggctgggggacagagtcatcaccaccagcacccgaacctgggccctgcccacctacaacaatcacctctacaagcaaatctccaacagcacatctggaggatcttcaaatgacaacgcctacttcggctacagcaccccctgggggtattttgacttcaacagattccactgccacttctcaccacgtgactggcagcgactcatcaacaacaactggggattccggcctaagcgactcaacttcaagctcttcaacattcaggtcaaagaggttacggacaacaatggagtcaagaccatcgccaataaccttaccagcacggtccaggtcttcacggactcagactatcagctcccgtacgtgctcgggtcggctcacgagggctgcctcccgccgttcccagcggacgttttcatgattcctcagtacgggtatctgacgcttaatgatggaagccaggccgtgggtcgttcgtccttttactgcctggaatatttcccgtcgcaaatgctaagaacgggtaacaacttccagttcagctacgagtttgagaacgtacctttccatagcagctacgctcacagccaaagcctggaccgactaatgaatccactcatcgaccaatacttgtactatctctcaaagactattaacggttctggacagaatcaacaaacgctaaaattcagtgtggccggacctagcaacatggctgtccagggaagaaactacatacctggacccagctaccgacaacaacgtgtctcaaccactgtgactcaaaacaacaacagcgaatttgcttggcctggagcttcttcttgggctctcaatggacgtaatagcttgatgaatcctggacctgctatggccagccacaaagaaggagaggaccgtttctttcctttgtctggatctttaatttttggcaaacaaggaactggaagagacaacgtggatgcggacaaagtcatgataaccaacgaagaagaaattaaaactactaacccggtagcaacggagtcctatggacaagtggccacaaaccaccagagtgcccaagcacaggcgcagaccggctgggttcaaaaccaaggaatacttccgggtatggtttggcaggacagagatgtgtacctgcaaggacccatttgggccaaaattcctcacacggacggcaactttcacccttctccgctgatgggagggtttggaatgaagcacccgcctcctcagatcctcatcaaaaacacacctgtacctgcggatcctccaacggccttcaacaaggacaagctgaactctttcatcacccagtattctactggccaagtcagcgtggagatcgagtgggagctgcagaagaaaaacagcaagcgctggaacccggagatccagtacacttccaactattacaagtctaataatgttgaatttgctgttaacactgaaggtgtatatagtgaaccccgccccattggcaccagatacctgactcgtaatctgtaattgcttgttaatcaataaaccgtttaattcgtttcagttgaactgcggcc

SEQ ID NO: 586 - DNA, 2601 bp, Artificial Sequence
  source: /note="Description of Artificial Sequence: Synthetic polynucleotide"
ccatcgacgtcagacgcggaagcttcgatcaactacgcggacaggtaccaaaacaaatgttctcgtcacgtgggcatgaatctgatgctgtttccctgcagacaatgcgagagactgaatcagaattcaaatatctgcttcactcacggtgtcaaagactgtttagagtgctttcccgtgtcagaatctcaacccgtttctgtcgtcaaaaaggcgtatcagaaactgtgctacattcatcacatcatgggaaaggtgccagacgcttgcactgcttgcgacctggtcaatgtggacttggatgactgtgtttctgaacaataaatgacttaaaccaggtatggctgccgatggttatcttccagattggctcgaggacaaccttagtgaaggaattcgcgagtggtgggctttgaaacctggagcccctcaacccaaggcaaatcaacaacatcaagacaacgctcgaggtcttgtgcttccgggttacaaataccttggacccggcaacggactcgacaagggggagccggtcaacgcagcagacgcggcggccctcgagcacgacaaggcctacgaccagcagctcaaggccggagacaacccgtacctcaagtacaaccacgccgacgccgagttccaggagcggctcaaagaagatacgtcttttgggggcaacctcgggcgagcagtcttccaggccaaaaagaggcttcttgaacctcttggtctggttgaggaagcggctaagacggctcctggaaagaagaggcctgtagagcagtctcctcaggaaccggactcctccgcgggtattggcaaatcgggtgcacagcccgctaaaaagagactcaatttcggtcagactggcgacacagagtcagtcccagaccctcaaccaatcggagaacctcccgcagccccctcaggtgtgggatctcttacaatggcttcaggtggtggcgcaccagtggcagacaataacgaaggtgccgatggagtgggtagttcctcgggaaattggcattgcgattcccaatggctgggggacagagtcatcaccaccagcacccgaacctgggccctgcccacctacaacaatcacctctacaagcaaatctccaacagcacatctggaggatcttcaaatgacaacgcctacttcggctacagcaccccctgggggtattttgacttcaacagattccactgccacttctcaccacgtgactggcagcgactcatcaacaacaactggggattccggcctaagcgactcaacttcaagctcttcaacattcaggtcaaagaggttacggacaacaatggagtcaagaccatcgccaataaccttaccagcacggtccaggtcttcacggactcagactatcagctcccgtacgtgctcgggtcggctcacgagggctgcctcccgccgttcccagcggacgttttcatgattcctcagtacgggtatctgacgcttaatgatggaagccaggccgtgggtcgttcgtccttttactgcctggaatatttcccgtcgcaaatgctaagaacgggtaacaacttccagttcagctacgagtttgagaacgtacctttccatagcagctacgctcacagccaaagcctggaccgactaatgaatccactcatcgaccaatacttgtactatctctcaaagactattaacggttctggacagaatcaacaaacgctaaaattcagtgtggccggacccagcaacatggctgtccagggaagaaactacatacctggacccagctaccgacaacaacgtgtctcaaccactgtgactcaaaacaacaacagcgaatttgcttggcctggagcttcttcttgggctctcaatggacgtaatagcttgatgaatcctggacctgctatggccagccacaaagaaggagaggaccgtttctttcctttgtctggatctttaatttttggcaaacaaggaactggaagagacaacgtggatgcggacaaagtcatgataaccaacgaagaagaaattaaaactactaacccggtagcaacggagtcctatggacaagtggccacaaaccaccagagtgcccaagcacgggcgcagaccggctgggttcaaaaccaaggaatacttccgggtatggtttggcaggacagagatgtgtacctgcaaggacccatttgggccaaaattcctcacacggacggcaactttcacccttctccgctgatgggagggtttggaatgaagcacccgcctcctcagatcctcatcaaaaacacacctgtacctgcggatcctccaacggccttcaacaaggacaagctgaactctttcatcacccagtattctactggccaagtcagcgtggagatcgagtgggagctgcagaaggaaaacagcaagcgctggaacccggagatccagtacacttccaactattacaagtctaataatgttgaatttgctgttaatactgaaggtgtatatagtgaaccccgccccattggcaccagatacctgactcgtaatctgtaattgcttgttaatcaataaaccgtttaattcgtttcagttgaactgcggcc

SEQ ID NO: 587 - DNA, 2601 bp, Artificial Sequence
  source: /note="Description of Artificial Sequence: Synthetic polynucleotide"
ccatcgacgtcagacgcggaagcttcgatcaactacgcggacaggtaccaaaacaaatgttctcgtcacgtgggcatgaatctgatgctgtttccctgcagacaatgcgagagactgaatcagaattcaaatatctgcttcactcacggtgtcaaagactgtttagagtgctttcccgtgtcagaatctcaacccgtttctgtcgtcaaaaaggcgtatcagaaactgtgctacattcatcacatcatgggaaaggtgccagacgcttgcactgcttgcgacctggtcaatgtggacttggatgactgtgtttctgaacaataaatgacttaaaccaggtatggctgccgatggttatcttccagattggctcgaggacaaccttagtgaaggaattcgcgagtggtgggctttgaaacctggagcccctcaacccaaggcaaatcaacaacatcaagacaacgctcgaggtcttgtgcttccgggttacaaataccttggacccggcaacggactcgacaagggggagccggtcaacgcagtagacgcggcggccctcgagcacgacaaggcctacgaccagcagctcaaggccggagacaacccgtacctcaagtacaaccacgccgacgccgagttccaggagcggctcaaagaagatacgtcttttgggggcaacctcgggcgagcagtcttccaggccaaaaagaggcttcttgaacctcttggtctggttgaggaagcggctaagacggctcctggaaagaagaggcctgtagagcagtctcctcaggaaccggactcctccgcgggtattggcaaatcgggtgcacagcccgctaaaaagagactcaatttcggtcagactggcgacacagagtcagtcccagaccctcaaccaatcggagaacctcccgcagccccctcaggtgtgggatctcttacaatggcttcaggtggtggcgcaccagtggcagacaataacgaaggtgccgatggagtgggtagttcctcgggaaattggcattgcgattcccaatggctgggggacagagtcatcaccaccagcacccgaacctgggccctgcccacctacaacaatcacctctacaagcaaatctccaacagcacatctggaggatcttcaaatgacaacgcctacttcggctacagcaccccctgggggtattttgacttcaacagattccactgccacttctcaccacgtgactggcagcgactcatcaacaacaactggggatttcggcctaagcgactcaacttcaagctcttcaacattcaggtcaaagaggttacggacaacaatggagtcaagaccatcgccaataaccttaccagcacggtccaggtcttcacggactcagactatcagctcccgtacgtgctcgggtcggctcacgagggctgcctcccgccgttcccagcggacgttttcatgattcctcagtacgggtatctgacgcttaatgatggaagccaggccgtgggtcgttcgtccttttactgcctggaatatttcccgtcgcaaatgctaagaacgggtaacaacttccagttcagctacgagtttgagaacgtacctttccatagcagctacgctcacagccaaagcctggaccgactaatgaatccactcatcgaccaatacttgtactatctctcaaagactattaacggttctggacagaatcaacaaacgctaaaattcagtgtggccggacccagcaacatggctgtccagggaagaaactacatacctggacccagctaccgacaacaacgtgtctcaaccactgtgactcaaaacaacaacagcgaatttgcttggcctggagcttcttcttgggctctcaatggacgtaatagcttgatgaatcctggacctgctatggccagccacaaagaaggagaggaccgtttctttcctttgtctggatctttaatttttggcaaacaaggaactggaagagacaacgtggatgcggacaaagtcatgataaccaacgaagaagaaattaaaactactaacccggtagcaacggagtcctatggacaagtggccacaaaccaccagagtgcccaagcacaggcgcagaccggctgggttcaaaaccaaggaatacttccgggtatggtttggcaggacagagatgtgtacctgcaaggacccatttgggccaaaattcctcacacggacggcaactttcacccttctccgctgatgggagggtttggaatgaagcacccgcctcctcagatcctcatcaaaaacacacctgtacctgcggatcctccaacggccttcaacaaggacaagctgaactctttcatcacccagtattctactggccaagtcagcgtggagatcgagtgggagctgcagaaggaaaacagcaagcgctggaacccggagatccagtacacttccaactattacaagtctaataatgttgaatttgctgttaatactgaaggtgtatatagtgaaccccgccccattggcaccagatacctgactcgtaatctgtaattgcttgttaatcaataaaccgtttaattcgtttcagttgaactgcggcc

SEQ ID NO: 588 - DNA, 2580 bp, Artificial Sequence
  source: /note="Description of Artificial Sequence: Synthetic polynucleotide"
ccatcgacgtcagacgcggaagcttcgatcaactacgcggacaggtaccaaaacaaatgttctcgtcacgtgggcatgaatctgatgctgtttccctgcagacaatgcgagagactgaatcagaattcaaatatctgcttcactcacggtgtcaaagactgtttagagtgctttcccgtgtcagaatctcaacccgtttctgtcgtcaaaaaggcgtatcagaaactgtgctacattcatcacatcatgggaaaggtgccagacgcttgcactgcttgcgacctggtcaatgtggacttggatgactgtgtttctgaacaataaatgacttaaaccaggtatggctgccgatggttatcttccagattggctcgaggacaaccttagtgaaggaattcgcgagtggtgggctttgaaacctggagcccctcaacccaaggcaaatcaacaacatcaagacaacgctcgaggtcttgtgcttccgggttacaaataccttggacccggcaacggactcgacaagggggagccggtcaacgcagcagacgcggcggccctcgagcacgacaaggcctacgaccagcagctcaaggccggagacaacccgtacctcaagtacaaccacgccgacgccgagttccaggagcggctcaaagaagatacgtcttttgggggcaacctcgggcgagcagtcttccaggccaaaaagaggcttcttgaacctcttggtctggttgaggaagcggctaagacggctcctggaaagaagaggcctgtagagcagtctcctcgggaaccggactcctccgcgggtattggcaaatcgggtgcacagcccgctaaaaagagactcaatttcggtcagactggcgacacagagtcagtcccagaccctcaaccaatcggagaacctcccgcagccccctcaggtgtgggatctcttacaatggcttcaggtggtggcgcaccagtggcagacaataacgaaggtgccgatggagtgggtagttcctcgggaaattggcattgcgattcccaatggctgggggacagagtcatcaccaccagcacccgaacctgggccctgcccacctacaacaatcacctctacaagcaaatctccaacagcacatctggaggatcttcaaatgacaacgcctacttcggctacagcaccccctgggggtattttgacttcaacagattccactgccacttctcaccacgtgactggcagcgactcatcaacaacaactggggattccggcctaagcgactcaacttcaagctcttcaacattcaggtcaaagaggttacggacaacaatggagtcaagaccatcgccaataaccttaccagcacggtccaggtcttcacggactcagactatcagctcccgtacgtgctcgggtcggctcacgagggctgcctcccgccgttcccagcggacgttttcatgattcctcagtacgggtatctgacgcttaatgatggaagccaggccgtgggtcgttcgtccttttactgcctggaatatttcccgtcgcaaatgctaagaacgggtaacaacttccagttcagctacgagtttgagaacgtacctttccatagcagctacgctcacagccaaagcctggaccgactaatgaatccactcatcgaccaatacttgtactatctctcaaagactattaacggttctggacagaatcaacaaacgctaaaattcagtgtggccggacccagcaacatggctgtccagggaagaaactacatacctggacccagctaccgacaacaacgtgtctcaaccactgtgactcaaaacaacaacagcgaatttgcttggcctggagcttcttcttgggctctcaatggacgtaatagcttgatgaatcctggacctgctatggccagccacaaagaaggagaggaccgtttctttcctttgtctggatctttaatttttggcaaacaaggaactggaagagacaacgtggatgcggacaaagtcatgataaccaacgaagaagaaattaaaactactaacccggtagcaacggagtcctatggacaagtggccacaaaccaccagagtgcccaagcacaggcgcagaccggctgggttcaaaaccaaggaatacttccgggtatggtttggcaggacagagatgtgtacctgcaaggacccatttgggccaaaattcctcacacggacggcaactttcacccttctccgctgatgggagggtttggaatgaagcacccgcctcctcagatcctcatcaaaaacacacctgtacctgcggatcctccaacggccttcaacaaggacaagctgaactctttcatcacccagtattctactggccaagtcagcgtggagatcgagtgggaactgcagaaggaaaacagcaagcgctggaacccggagatccagtacacttccaactattacaagtctaataatgttgaatttgctgttaatactgaaggtgtatatagtgaaccccgccccattggcaccagatacctgactcgtaatctgtaattgcttgttaatcaataaaccgtttaatt

SEQ ID NO: 589 - DNA, 2601 bp, Artificial Sequence
  source: /note="Description of Artificial Sequence: Synthetic polynucleotide"
ccatcgacgtcagacgcggaagcttcgatcaactacgcggacaggtaccaaaacaaatgttctcgtcacgtgggcatgaatctgatgctgtttccctgcagacaatgcgagagactgaatcagaattcaaatatctgcttcactcacggtgtcaaagactgtttagagtgctttcccgtgtcagaatctcaacccgtttctgtcgtcaaaaaggcgtatcagaaactgtgctacattcatcacatcatgggaaaggtgccagacgcttgcactgcttgcgacctggtcaatgtggacttggatgactgtgtttctgaacaataaatgacttaaaccaggtatggctgccgatggttatcttccagattggctcgaggacaaccttagtgaaggaattcgcgagtggtgggctttgaaacctggagcccctcaacccaaggcaaatcaacaacatcaagacaacgctcgaggtcttgtgcttccgggttacaaataccttggacccggcaacggactcgacaagggggagccggtcaacgcagcagacgcggcggccctcgagcacgacaaggcctacgaccagcagctcaaggccggagacaacccgtacctcaagtacaaccacgccgacgccgagttccaggagcggctcaaagaagatacgtcttttgggggcaacctcgggcgagcagtctttcaggccaaaaagaggcttcttgaacctcttggtctggttgaggaagcggctaagacggctcctggaaagaagaggcctgtagagcagtctcctcaggaaccggactcctccgcgggtattggcaaatcgggtgcacagcccgctaaaaagagactcaatttcggtcagactggcgacacagagtcagtcccagaccctcaaccaatcggagaacctcccgcagccccctcaggtgtgggatctcttacaatggcttcatgtggtggcgcaccagtggcagacaataacgaaggtgccgatggagtgggtagttcctcgggaaattggcattgcgattcccaatggctgggggacagagtcatcaccaccagcacccgaacctgggccctgcccacctacaacaatcacctctacaagcaaatctccaacagcacatctggaggatcttcaaatgacaacgcctacttcggctacagcaccccctgggggtattttgacttcaacagattccactgccacttctcaccacgtgactggcagcgactcatcaacaacaactggggattccggcctaagcgactcaacttcaagctcttcaacattcaggtcaaagaggttacggacaacaatggagtcaagaccatcgccaataaccttaccagcacggtccaggtcttcacggactcagactatcagctcccgtacgtgctcgggtcggctcacgagggctgcctcccgccgttcccagcggacgttttcatgattcctcagtacgggtatctgacgcttaatgatggaagccaggccgtgggtcgttcgtccttttactgcctggaatatttcccgtcgcaaatgctaagaacgggtaacaacttccagttcagctacgagtttgagaacgtacctttccatagcagctacgctcacagccaaagcctggaccgactaatgaatccactcatcgaccaatacttgtactatctctcaaagactattaacggttctggacagaatcaacaaacgctaaaattcagtgtggccggacccagcaacatggctgtccagggaagaaactacatacctggacccagctaccgacaacaacgtgtctcaaccactgtgactcaaaacaacaacagcgaatttgcttggcctggagcttcttcttgggctctcaatggacgtaatagcttgatgaatcctggacctgctatggccagccacaaagaaggagaggaccgtttctttcctttgtctggatctttaatttttggcaaacaaggaactggaagagacaacgtggatgcggacaaagtcatgataaccaacgaagaagaaattaaaactactaacccggtagcaacggagtcctatggacaagtggccacaaaccaccagagtgcccaagcacaggcgcagaccggctgggttcaaaaccaaggaatacttccgggtatggtttggcaggacagagatgtgtacctgcaaggacccatttgggccaaaattcctcacacggacggcaactttcacccttctccgctgatgggagggtttggaatgaagcacccgcctcctcagatcctcatcaaaaacacacctgtacctgcggatcctccaacggccttcaacaaggacaagctgaactctttcatcacccagtattctactggccaagtcagcgtggagatcgagtgggagctgcagaaggaaaacagcaagcgctggaacccggagatccagtacacttccaactattacaagtctaataatgttgaatttgctgttaatactgaaggtgtatatagtgaaccccgccccattggcaccagatacctgactcgtaatctgtaattgcttgttaatcaataaaccgtttaattcgtttcagttgaactgcggcc

SEQ ID NO: 590 - DNA, 2601 bp, Artificial Sequence
  source: /note="Description of Artificial Sequence: Synthetic polynucleotide"
ccatcgacgtcagacgcggaagcttcgatcaactacgcggacaggtaccaaaacaaatgttctcgtcacgtgggcatgaatctgatgctgtttccctgcagacaatgcgagagactgaatcagaattcaaatatctgcttcactcacggtgtcaaagactgtttagagtgctttcccgtgtcagaatctcaacccgtttctgtcgtcaaaaaggcgtatcagaaactgtgctacattcatcacatcatgggaaaggtgccagacgcttgcactgcttgcgacctggtcaatgtggacttggatgactgtgtttctgaacaataaatgacttaaaccaggtatggctgccgatggttatcttccagattggctcgaggacaaccttagtgaaggaattcgcgagtggtgggctttgaaacctggagcccctcaacccaaggcaaatcaacaacatcaagacaacgctcgaggtcttgtgcttccgggttacaaataccttggacccggcaacggactcgacaagggggagccgatcaacgcagcagacgcggcggccctcgagcacgacaaggcctacgaccagcagctcaaggccggagacaacccgtacctcaagtacaaccacgccgacgccgagttccaggagcggctcaaagaagatacgtcttttgggggcaacctcgggcgagcagtcttccaggccaaaaagaggcttcttgaacctcttggtctggttgaggaagcggctaagacggctcctggaaagaagaggcctgtagagcagtctcctcaggaaccggactcctccgcgggtattggcaaatcgggtgcacagcccgctaaaaagagactcaatttcggtcagactggcgacacagagtcagtcccagaccctcaaccaatcggagaacctcccgcagccccctcaggtgtgggatctcttacaatggcttcaggtggtggcgcaccagtggcagacaataacgaaggtgccgatggagtgggtagttcctcgggaaattggcattgcgattcccaatggctgggggacagagtcatcaccaccagcacccgaacctgggccctgcccacctacaacaatcacctctacaagcaaatctccaacagcacatctggaggatcttcaaatgacaacgcctacttcggctacagcaccccctgggggtattttgacttcaacagattccactgccacttctcaccacgtgactggcagcgactcatcaacaacaactggggattccggcctaagcgactcaacttcaagctcttcaacattcaggtcaaagaggttacggacaacaatggagtcaagaccatcgccaataaccttaccagcacggtccaggtcttcacggactcagactatcagctcccgtacgtgctcgggtcggctcacgagggctgcctcccgccgttcccagcggacgttttcatgattcctcagtacgggtatctgacgcttaatgatggaagccaggccgtgggtcgttcgtccttttactgcctggaatatttcccgtcgcaaatgctaagaacgggtaacaacttccagttcagctacgagtttgagaacgtacctttccatagcagctacgctcacagccaaagcctggaccgactaatgaatccactcatcgaccaatacttgtactatctctcaaagactattaacggttctggacagaatcaacaaacgctaaaattcagtgtggccggacccagcaacatggctgtccagggaagaaactacatacctggacccagctaccgacaacaacgtgtctcaaccactgtgactcaaaacaacaacagcgaatttgcttggcctggagcttcttcttgggctctcaatggacgtaatagcttgatgaatcctggacctgctatggccagccacaaagaaggagaggaccgtttctttcctttgtctggatctttaatttttggcaaacaaggaactggaagagacaacgtggatgcggacaaagtcatgataaccaacgaagaagaaattaaaactactaacccggtagcaacggagtcctatggacaagtggccacaaaccaccagagtgcccaagcacaggcgcagaccggctgggttcaaaaccaaggaatacttccgggtatggtttggcaggacagagatgtgtacctgcaaggacccatttgggccaaaattcctcacacgtacggcaactttcacccttctccgctgatgggagggtttggaatgaagcacccgcctcctcagatcctcatcaaaaacacacctgtacctgcggatcctccaacggccttcaacaaggacaagctgaactctttcatcacccagtattctactggccaagtcagcgtggagatcgagtgggagctgcagaaggaaaacagcaagcgctggaacccggagatccagtacacttccaactattacaagtctaataatgttgaatttgctgttaatactgaaggtgtatatagtgaaccccgccccattggcaccagatacctgactcgtaatctgtaattgcttgttaatcaataaaccgtttaattcgtttcagttgaactgcggcc

SEQ ID NO: 591 - DNA, 2601 bp, Artificial Sequence
  source: /note="Description of Artificial Sequence: Synthetic polynucleotide"
ccatcgacgtcagacgcggaagcttcgatcaactacgcggacaggtaccaaaacaaatgttctcgccacgtgggcatgaatctgatgctgtttccctgcagacaatgcgagagactgaatcagaattcaaatatctgcttcactcacggtgtcaaagactgtttagagtgctttcccgtgtcagaatctcaacccgtttctgtcgtcaaaaaggcgtatcagaaactgtgctacattcatcacatcatgggaaaggtgccagacgcttgcactgcttgcgacctggtcaatgtggacttggatgactgtgtttctgaacaataaatgacttaaaccaggtatggctgccgatggttatcttccagattggctcgaggacaaccttagtgaaggaattcgcgagtggtgggctttgaaacctggagcccctcaacccaaggcaaatcaacaacatcaagacaacgctcgaggtcttgtgcttccgggttacaaataccttggacccggcaacggactcgacaagggggagccggtcaacgcagcagacgcggcggccctcgagcacgacaaggcctacgaccagcagctcaaggccggagacaacccgtacctcaagtacaaccacgccgacgccgagttccaggagcggctcaaagaagatacgtcttttgggggcaacctcgggcgagcagtcttccaggccaaaaagaggcttcttgaacctcttggtctggttgaggaagcggctaagacggctcctggaaagaagaggcctgtagagcagtctcctcaggaaccggactcctccgcgggtattggcaaatcgggtgcacagcccgctaaaaagagactcaatttcggtcagactggcgacacagagtcagtcccagaccctcaaccaatcggagaacctcccgctgccccctcaggtgtgggatctcttacaatggcttcaggtggtggcgcaccagtggcagacaataacgaaggtgccgatggagtgggtagttcctcgggaaattggcattgcgattcccaatggctgggggacagagtcatcaccaccagcacccgaacctgggccctgcccacctacaacaatcacctctacaagcaaatctccaacagcacatctggaggatcttcaaatgacaacgcctacttcggctacagcaccccctgggggtattttgacttcaacagattccactgccacttctcaccacatgactggcagcgactcatcaacaacaactggggattccggcctaagcgactcaacttcaagctcttcaacattcaggtcaaagaggttacggacaacaatggagtcaagaccatcgccaataaccttaccagcacggtccaggtcttcacggactcagactatcagctcccgtacgtgctcgggtcggctcacgagggctgcctcccgccgttcccagcggacgttttcatgattcctcagtacgggtatctgacgcttaatgatggaagccaggccgtgggtcgttcgtccttttactgcctggaatatttcccgtcgcaaatgctaagaacgggtaacaacttccagttcagctacgagtttgagaacgtacctttccatagcagctacgctcacagccaaagcctggaccgactaatgaatccactcatcgaccaatacttgtactatctctcaaagactattaacggttctggacagaatcaacaaacgctaaaattcaatgtggccggacccagcaacatggctgtccagggaagaaactacatacctggacccagctaccgacaacaacgtgtctcaaccactgtgactcaaaacaacaacagcgaatttgcctggcctagagcttcttcttgggctctcaatggacgtaatagcttgatgaatcctggacctgctatggccagccacaaagaaggagaggaccgtttctttcctttgtctggatctttaatttttggcaaacaaggaactggaagagacaacgtggatgcggacaaagtcatgataaccaacgaagaagaaattaaaactactaacccggtagcaacggagtcctatggacaagtggccacaaaccaccagagtgcccaagcacaggcgcagaccggctgggttcaaaaccaaggaatacttccgggtatggtttggcaggacagagatgtgtacctgcaaggacccatttgggccaaaattcctcacacggacggcaactttcacccttctccgctgatgggagggtttggaatgaagcacccgcctcctcagatcctcatcaaaaacacacctgtacctgcggatcctccaacggccttcaacaaggacaagctgaactctttcatcacccagtattctactggccaagtcagcatggagatcgagtgggagctgcagaaggaaaacagcaagcgctggaacccggagatccagtacacttccaactattacaagtctaataatgttgaatttgctgttaatactgaaggtgtatatagtgaaccccgccccattggcaccagatacctgactcgtaatctgtaattgcttgttaatcaataaaccgtttaattcgtttcagttgaactgcggcc

SEQ ID NO: 592 - DNA, 2601 bp, Artificial Sequence
  source: /note="Description of Artificial Sequence: Synthetic polynucleotide"
ccatcgacgtcagacgcggaagcttcgatcaactacgcggacaggtaccaaaacaaatgttctcgtcacgtgggcatgaatctgatgctgtttccctgcagacaatgcgagagactgaatcagaattcaaatatctgcttcactcacggtgtcaaagactgtttagagtgctttcccgtgtcagaatctcaacccgtttctgtcgtcaaaaaggcgtatcagaaactgtgctacattcatcacatcatgggaaaggtgccagacgcttgcactgcttgcgacctggtcaatgtggacttggatgactgtgtttctgaacaataaatgacttaaaccaggtatggctgccgatggttatcttccagattggctcgaggacaaccttagtgaaggaattcgcgagtggtgggctttgaaacctggagcccctcaacccaaggcaaatcaacaacatcaagacaacgctcgaggtcttgtgcttccgggttacaaataccttggacccggcaacggactcgacaagggggagccggtcaacgcagcagacgcggcggccctcgagcacgacaaggcctacgaccagcagctcaaggccggagacaacccgtacctcaagtacaaccacgccgacgccgagttccaggagcggctcaaagaagatacgtcttttgggggcaacctcgggcgagcagtcttccaggccaaaaagaggcttcttgaacctcttggtctggttgaggaagcggctaagacggctcctggaaagaagaggcctgtagagcagtctcctcaggaaccggactcctccgcgggtattggcaaatcgggtgcacagcccgctaaaaagagactcaatttcggtcagactggcgacacagagtcagtcccagaccctcaaccaatcggagaacctcccgcagccccctcaggtgtgggatctcttacaatggcttcaggtggtggcgcaccagtggcagacaataacgaaggtgccgatggagtgggtagttcctcgggaaattggcattgcgattcccaatggctgggggacagagtcatcaccaccagcacccgaacctgggccctgcccacctacaacaatcacctctacaagcaaatctccaacagcacatctggaggatcttcaaatgacaacgcctacttcggctacagcaccccctgggggtattttgacttcaacagattccactgccacttctcaccacgtgactggcagcgactcatcaacaacaactggggattccggcctaagcgactcaacttcaagctcttcaacattcaggtcaaagaggttacggacaacaatggagtcaagaccatcgccaataaccttaccagcacggtccaggtcttcacggactcagactatcagctcccgtacgtgctcgggtcggctcacgagggctgcctcccgccgttcccagcggacgttttcatgattcctcagtacgggtatctgacgcttaatgatggaagccaggccgtgggtcgttcgtccttttactgcctggaatatttcccgtcgcaaatgctaagaacgggtaacaacttccagttcagctacgagtttgagaacgtacctttccatagcagctacgctcacagccaaagcctggaccgactaatgaatccactcatcgaccaatacttgtactatctctcaaagactattaacggttctggacagaatcaacaaacgctaaaattcagtgtggccggacccagcaacatggctgtccagggaagaaactacatacctggacccagctaccgacaacaacgtgtctcaaccactgtgactcaaaacaacaacagcgaatttgcttggcctagagcttcttcttgggctctcaatggacgtaatagcttgatgaatcctggacctgctatggccagccacaaagaaggagaggaccgtttctttcctttgtctggatctttaatttttggcaaacaaggaactggaagagacaacgtggatgcggacaaagtcatgataaccaacgaagaagaaattaaaactactaacccggtagcaacggagtcctatggacaagtggccacaaaccaccagagtgcccaagcacaggcgcagaccggctgggttcaaaaccaaggaatacttccgggtatggtttggcaggacagagatgtgtacctgcaaggacccatttgggccaaaattcctcacacggacggcaactttcacccttctccgctgatgggagggtttggaatgaagcacccgcctcctcagatcctcatcaaaaacacacctgtacctgcggatcctccaacggccttcaacaaggacaagctgaactctttcatcacccagtattctactggccaagtcagcgtggagatcgagtgggagctgcagaaggaaaacagcaagcgctggaacccggagatccagtacacttccaactattacaagtctaataatgttgaatttgctgttaatactgaaggtgtatatagtgaaccccgccccattggcaccagatacctgactcgtaatctgtaattgcttgttaatcaataaaccgtttaattcgtttcagttgaactgcggcc

SEQ ID NO: 593 - DNA, 2601 bp, Artificial Sequence
  source: /note="Description of Artificial Sequence: Synthetic polynucleotide"
ccatcgacgtcagacgcggaagcttcgatcaactacgcggacaggtaccaaaacaaatgttctcgtcacgtgggcatgaatctgatgctgtttccctgcagacaatgcgagagactgaatcagaattcaaatatctgcttcactcacggtgtcaaagactgtttagagtgctttcccgtgtcagaatctcaacccgtttctgtcgtcaaaaaggcgtatcagaaactgtgctacattcatcacatcatgggaaaggtgccagacgcttgcactgcttgcgacctggtcaatgtggacttggatgactgtgtttctgaacaataaatgacttaaaccaggtatggctgccgatggttatcttccagattggctcgaggacaaccttagtgaaggaattcgcgagtggtgggctttgaaacctggagcccctcaacccaaggcaaatcaacaacatcaagacaacgctcgaggtcttgtgcttccgggttacaaataccttggacccggcaacggactcgacaagggggagccggtcaacgcagcagacgcggcggccctcgagcacgacaaggcctacgaccagcagctcaaggccggagacaacccgtacctcaagtacaaccacgccgacgccgagttccaggagcggctcaaagaagatacgtcttttgggggcaacctcgggcgagcagtcttccaggccaaaaagaggcttcttgaacctcttggtctggttgaggaagcggctaagacggctcctggaaagaagaggcctgtagagcagtctcctcaggaaccggactcctccgcgggtattggcaaatcgggtgcacagcccgctaaaaagagactcaatttcggtcagactggcgacacagagtcagtcccagaccctcaaccaatcggagaacctcccgcagccccctcaggtgtgggatctcttacaatggcttcaggtggtggcgcaccagtggcagacaataacgaaggtgccgatggagtgggtagttcctcgggaaattggcattgcgattcccaatggctgggggacagagtcatcaccaccagcacccgaacctgggccctgcccacctacaacaatcacctctacaagcaaatctccaacagcacatctggaggatcttcaaatgacaacgcctacttcggctacagcaccccctgggggtattttgacttcaacagattccactgccacttctcaccacgtgactggcagcgactcatcaacaacaactggggattccggcctaagcgactcaacttcaagctcttcaacattcaggtcaaagaggttacggacaacaatggagtcaagaccatcgccaataaccttaccagcacggtccaggtcttcacggactcagactatcagctcccgtacgtgctcgggtcggctcacgagggctgcctcccgccgttcccagcggacgttttcatgattcctcagtacgggtatctgacgcttaatgatggaagccaggccgtgggtcgttcgtccttttactgcctggaatatttcccgtcgcaaatgctaagaacgggtaacaacttccagttcagctacgagtttgagaacgtacctttccatagcagctacgctcacagccaaagcctggaccgactaatgaatccactcatcgaccaatacttgtactatctctcaaagactattaacggttctggacagaatcaacaaacgctaaaattcagtgtggccggacccagcaacatggctgtccagggaagaaactacatacctggacccagctaccgacaacaacgtgtctcaaccactgtgactcaaaacaacaacagcgaatttgcttggcctagagcttcttcttgggctctcaatggacgtaatagcttgatgaatcctggacctgctatggccagccacaaagaaggagaggaccgtttctttcctttgtctggatctttaatttttggcaaacaaggaactggaagagacaacgtggatgcggacaaagtcatgataaccaacgaagaagaaattaaaactactaacccggtagcaacggagtcctatggacaagtggccacaaaccaccagagtgcccaagcacaggcgcagaccggctgggttcaaaaccaaggaatacttccgggtatggtttggcaggacagagatgtgtacctgcaaggacccatttgggccaaaattcctcacacggacggcaactttcacccttctccgctgatgggagggtttggaatgaagcacccgcctcctcagatcctcatcaaaaacacacctgtacctgcggatcctccaacggccttcaacaaggacaagctgaactctttcatcacccagtattctactggccaagtcagcgtggagatcgagtgggagcggcagaaggaaaacagcaagcgctggaacccggagatccagtacacttccaactattacaagtctaataatgttgaatttgctgttaatactgaaggtgtatatagtgaaccccgccccattggcaccagatacctgactcgtaatctgtaattgcttgttaatcaataaaccgtttaattcgtttcagttgaactgcggcc

SEQ ID NO: 594 - DNA, 2601 bp, Artificial Sequence
  source: /note="Description of Artificial Sequence: Synthetic polynucleotide"
ccatcgacgtcagacgcggaagcttcgatcaactacgcggacaggtaccaaaacaaatgttctcgtcacgtgggcatgaatctgatgctgtttccctgcagacaatgcgagagactgaatcagaattcaaatatctgcttcactcacggtgtcaaagactgtttagagtgctttcccgtgtcagaatctcaacccgtttctgtcgtcaaaaaggcgtatcagaaactgtgctacattcatcacatcatgggaaaggtgccagacgcttgcactgcttgcgacctggtcaatgtggacttggatgactgtgtttctgaacaataaatgacttaaaccaggtatggctgccgatggttatcttccagattggctcgaggacaaccttagtgaaggaattcgcgagtggtgggctttgaaacctggagcccctcaacccaaggcaaatcaacaacatcaagacaacgctcgaggtcttgtgcttccgggttacaaataccttggacccggcaacggactcgacaagggggagccggtcaacgcagcagacgcggcggccctcgagcacgacaaggcctacgaccagcagctcaaggccggagacaacccgtacctcaagtacaaccacgccgacgccgagttccaggagcggctcaaagaagatacgtcttttgggggcaacctcgggcgagcagtcttccaggccaaaaagaggcttcttgaacctcttggtctggttgaggaagcggctaagacggctcctggaaagaagaggcctgtagagcagtctcctcaggaaccggactcctccgcgggtattggcaaatcgggtgcacagcccgctaaaaagagactcaatttcggtcagactggcgacacagagtcagtcccagaccctcaaccaatcggagaacctcccgcagccccctcaggtgtgggatctcttacaatggcttcaggtggtggcgcaccagtggcagacaataacgaaggtgccgatggagtgggtagttcctcgggaaattggcattgcgattcccaatggctgggggacagagtcatcaccaccagcacccgaacctgggccctgcccacctacaacaatcacctctacaagcaaatctccaacagcacatctggaggatcttcaaatgacaacgcctacttcggctacagcaccccctgggggtattttgacttcaacagattccactgccacttctcaccacgtgactggcagcgactcatcaacaacaactggggattccggcctaagcgactcaacttcaagctcttcaacattcaggtcaaagaggttacggacaacaatggagtcaagaccatcgccaataaccttaccagcacggtccaggtcttcgcggactcagactatcagctcccgtacgtgctcgggtcggctcacgagggctgcctcccgccgttcccagcggacgttttcatgattcctcagtacgggtatctgacgcttaatgatggaagccaggccgtgggtcgttcgtccttttactgcctggaatatttcccgtcgcaaatgctaagaacgggtaacaacttccagttcagctacgagtttgagaacgtacctttccatagcagctacgctcacagccaaagcctggaccgactaatgaatccactcatcgaccaatacttgtactatctctcaaagactattaacggttctggacagaatcaacaaacgctaaaattcagtgtggccggacccagcaacatggctgtccagggaagaaactacatacctggacccagctaccgacaacaacgtgtctcaaccactgtgactcaaaacaacaacagcgaatttgcttggcctagagcttcttcttgggctctcaatggacgtaatagcttgatgaatcctggacctgctatggccagccacaaagaaggagaggaccgtttctttcctttgtctggatctttaatttttggcaaacaaggaactggaagagacaacgtggatgcggacaaagtcatgataaccaacgaagaagaaattaaaactactaacccggtagcaacggagtcctatggacaagtggccacaaaccaccagagtgcccaagcacaggcgcagaccggctgggttcaaaaccaaggaatacttccgggtatggtttggcaggacagagatgtgtacctgcaaggacccatttgggccaaaattcctcacacggacggcaactttcacccttctccgctgatgggagggtttggaatgaagcacccgcctcctcagatcctcatcaaaaacacacctgtacctgcggatcctccaacggccttcaacaaggacaagctgaactctttcatcacccagtattctactggccaagtcagcgtggagatcgagtgggagctgcagaaggaaaacagcaagcgctggaacccggagatccagtacacttccaactattacaagtctaataatgttgaatttgctgttaatactgaaggtgtatatagtgaaccccgccccattggcaccagatacctgactcgtaatctgtaattgcttgttaatcaataaaccgtttaattcgtttcagttgaactgcggcc

SEQ ID NO: 595 - DNA, 2601 bp, Artificial Sequence
  source: /note="Description of Artificial Sequence: Synthetic polynucleotide"
ccatcgacgtcagacgcggaagcttcgatcaactacgcggacaggtaccaaaacaaatgttctcgtcacgtgggcatgaatctgatgctgtttccctgcagacaatgcgagagactgaatcagaattcaaatatctgcttcactcacggtgtcaaagactgtttagagtgctttcccgtgtcagaatctcaacccgtttctgtcgtcaaaaaggcgtatcagaaactgtgctacattcatcacatcatgggaaaggtgccagacgcttgcactgcttgcgacctggtcaatgtggacttggatgactgtgtttctgaacaataaatgacttaaaccaggtatggctgccgatggttatcttccagattggctcgaggacaaccttagtgaaggaattcgcgagtggtgggctttgaaacctggagcccctcaacccaaggcaaatcaacaacatcaagacaacgctcgaggtcttgtgcttccgggttacaaataccttggacccggcaacggactcgacaagggggagccggtcaacgcagcagacgcggcggccctcgagcacgacaaggcctacgaccagcagctcaaggccggagacaacccgtacctcaagtacaaccacgccgacgccgagttccaggagcggctcaaagaagatacgtcttttgggggcaacctcgggcgagcagtcttccaggccaaaaagaggcttcttgaacctcttggtctggttgaggaagcggctaagacggctcctggaaagaagaggcctgtagagcagtctcctcaggaaccggactcctccgcgggtattggcaaatcgggtgcacagcccgctaaaaagagactcaatttcggtcagactggcgacacagagtcagtcccagaccctcaaccaatcggagaacctcccgcagccccctcaggtgtgggatctcttacaatggcttcaggtggtggcgcaccagtggcagacaataacgaaggtgccgatggagtgggtagttcctcgggaaattggcattgcgattcccaatggctgggggacagagtcatcaccaccagcacccgaacctgggccctgcccacctacaacaatcacctctacaagcaaatctccaacagcacatctggaggatcttcaaatgacaacgcctacttcggctacagcaccccctgggggtattttgacttcaacagattccactgccacttctcaccacgtgactggcagcgactcatcaacaacaactggggattccggcctaagcgactcaacttcaagctcttcaacattcaggtcaaagaggttacggacaacaatggagtcaagaccatcgccaataaccttaccagcacggtccaggtcttcacggactcagactatcagctcccgtacgtgctcgggtcggctcacgagggctgcctcccgccgttcccagcggacgttttcatgattcctcagtacgggtatctgacgcttaatgatggaagccaggccgtgggtcgttcgtccttttactgcctggaatatttcccgtcgcaaatgctaagaacgggtaacaacttccagttcagctacgagtttgagaacgtacctttccatagcagctacgctcacagccaaagcctggaccgactaatgaatccactcatcgaccaatacttgtactatctctcaaagactattaacggttctggacagaatcaacaaacgctaaaattcagtgtggccggacccagcaacatggctgtccagggaagaaactacatacctggacccagctaccgacaacaacgtgtctcaaccactgtgactcaaaacaacaacagcgaaattgcttggcctagagcttcttcttgggctctcaatggacgtaatagcttgatgaatcctggacctgctatggccagccacaaagaaggagaggaccgtttctttcctttgtctggatctttaatttttggcaaacaaggaactggaagagacaacgtggatgcggacaaagtcatgataaccaacgaagaagaaattaaaactactaacccagtagcaacggagtcctatggacaagtggccacaaaccaccagagtgcccaagcacaggcgcagaccggctgggttcaaaaccaaggaatacttccgggtatggtttggcaggacagagatgtgtacctgcaaggacccatttgggccaaaattcctcacacggacggcaactttcacccttctccgctgatgggagggtttggaatgaagcacccgcctcctcagatcctcatcaaaaacacacctgtacctgcggatcctccaacggccttcaacaaggacaagctgaactctttcatcacccagtattctactggccaagtcagcgtggagatcgagtgggagctgcagaaggaaaacagcaagcgctggaacccggagatccagtacacttccaactattgcaagtctaataatgttgaatttgctgttaatactgaaggtgtatatagtgaaccccgccccattggcaccagatacctgactcgtaatctgtaattgcttgttaatcaataaaccgtttaattcgtttcagttgaactgcggcc

SEQ ID NO: 596 - DNA, 2601 bp, Artificial Sequence
  source: /note="Description of Artificial Sequence: Synthetic polynucleotide"
ccatcgacgtcagacgcggaagcttcgatcaactacgcggacaggtaccaaaacaaatgttctcgtcacgtgggcatgaatctgatgctgtttccctgcagacaatgcgagagactgaatcagaattcaaatatctgcttcactcacggtgtcaaagactgtttagagtgctttcccgtgtcagaatctcaacccgtttctgtcgtcaaaaaggcgtatcagaaactgtgctacattcatcacatcatgggaaaggtgccagacgcttgcactgcttgcgacctggtcaatgtggacttggatgtctgtgtttctgaacaataaatgacttaaaccaggtatggctgccgatggttatcttccagattggctcgaggacaaccttagtgaaggaattcgcgagtggtgggctttgaaacctggagcccctcaacccaaggcaaatcaacaacatcaagacaacgctcgaggtcttgtgcttccgggttacaaataccttggacccggcaacggactcgataagggggagccggtcaacgcagcagacgcggcggccctcgagcacgacaaggcctacgaccagcagctcaaggccggagacaacccgtacctcaagtacaaccacgccgacgccgagttccaggagcggctcaaagaagatacgtcttttgggggcaacctcgggcgagcagtcttccaggccaaaaagaggcttcttgaacctcttggtctggttgaggaagcggctaagacggctcctggaaagaagaggcctgtagagcagtctcctcaggaaccggactcctccgcgggtattggcaaatcgggtgcacagcccgctaaaaagagactcaatttcggtcagactggcgacacagagtcagtcccagaccctcaaccaatcggagaacctcccgcagccccctcaggtgtgggatctcttacaatggcttcaggtggtggcgcaccagtggcagacaataacgaaggtgccgatggagtgggtagttcctcgggaaattggcattgcgattcccaatggctgggggacagagtcatcaccaccagcacccgaacctgggccctgcccacctacaacaatcacctctacaagcaaatctccaacagcacatctggaggatcttcaaatgacaacgcctacttcggctacagcaccccctgggggtattttgacttcaacagattccactgccacttctcaccacgtgactggcagcgactcatcaacaacaactggggattccggcctaagcgactcaacttcaagctcttcaacattcaggtcaaagaggttacggacaacaatggagtcaagaccatcgccaataaccttaccagcacggtccaggtcttcacggactcagactatcagctcccgtacgtgctcgggtcggctcacgagggctgcctcccgccgttcccagcggacgttttcatgattcctcagtacgggtatctgacgcttaatgatggaagccaggccgtgggtcgttcgtccttttactgcctggaatatttcccgtcgcaaatgctaagaacgggtaacaacttccagttcagctacgagtttgagaacgtacctttccatagcagctacgctcacagccaaagcctggaccgactaatgaatccactcatcgaccaatacttgtactatctctcaaagactattaacggttctggacagaatcaacaaacgctaaaattcagtgtggccggacccagcaacatggctgtccagggaagaaactacatacctggacccagctaccgacaacaacgtgtctcaaccactgtgactcaaaacaacaacagcgaatttgcttggcctagagcttcttcttgggctctcaatggacgtaatagcttgatgaatcctggacctgctatggccagccacaaagaaggagaggaccgtttctttcctttgtctggatctttaatttttggcaaacaaggaactggaagagacaacgtggatgcggacaaagtcatgataaccaacgaagaagaaattaaaactactaacccggtagcaacggagtcctatggacaagtggccacaaaccaccagagtgcccaagcacaggcgcagaccggctgggttcaaaaccaaggaatacttccgggtatggtttggcaggacagagatgtgtacctgcaaggacccatttgggccaaaattcctcacacggacggcaactttcacccttctccgctgatgggagggtttggaatgaagcacccgcctcctcagatcctcatcaaaaacacacctgtacctgcggatcctccaacggccttcaacaaggacaagctgaactctttcatcacccagtattctactggccaagtcagcgtggagatcgagtgggagctgcagaaggaaaacagcaagcgctggaacccggagatccagtacacttccaactattacaagtctaataatgttgaatttgctgttaatactgaaggtgtatatagtgaaccccgccccattggcaccagatacctgactcgtaatctgtaattgcttgttaatcaataaaccgtttaattcgtttcagttgaactgcggcc

SEQ ID NO: 597 - protein, 736 aa, Artificial Sequence
  source: /note="Description of Artificial Sequence: Synthetic polypeptide"
MTADGYLPDWLEDNLSEGIREWWALKPGAPQPKANQQHQDNARGLVLPGYKYLGPGNGLDKGEPVNAADAAALEHDKAYDQQLKAGDNPYLKYNHADAEFQERLKEDTSFGGNLGRAVFQAKKRLLEPLGLVEEAAKTAPGKKRPVEQSPQEPDSSAGIGKSGAQPAKKRLNFGQTGDTESVPDPQPIGEPPAAPSGVGSLTMASGGGAPVADNNEGADGVGSSSGNWHCDSQWLGDRVITTSTRTWALPTYNNHLYKQISNSTSGGSSNDNAYFGYSTPWGYFDFNRFHCHFSPRDWQRLINNNWGFRPKQLNFKLFNIQVKEVTDNNGVKTIANNLTSTVQVFTDSDYQLPYVLGSAHEGCLPPFPADVFMIPQYGYLTLNDGSQAVGRSSFYCLEYFPSQMLRTGNNFQFSYEFENVPFHSSYAHSQSLDRLMNPLIDQYLYYLSKTINGSGQNQQTLKFSVAGPSNMAVQGRNYIPGPSYRQQRVSTTVTQNNNSEFAWPGASSWALNGRNSLMNPGPAMASHKEGEDRFFPLSGSLIFGKQGTGRDNVDADKVMITNEEEIKTTNPVATESYGQVATNHQSAQAQAQTGWVQNQGILPGMVWQDRDVYLQGPIWAKIPHTDGNFHPSPLMGGFGMKHPPPQILIKNTPVPADPPTAFNKDKLNSFITQYSTGQVSVEIEWELQKENSKRWNPEIQYTSNYYKSNNVEFAVNTEGVYSEPRPIGTRYLTRNL

SEQ ID NO: 598 - protein, 736 aa, Artificial Sequence
  source: /note="Description of Artificial Sequence: Synthetic polypeptide"
MAADGYLPDWLEDNLSEGIREWWALKPGAPQPKANQQHQDNARGLVLPGYKYLGPGNGLDKGEPVNAADAAALEHDKAYDQQLKAGDNPYLKYNHADAEFQERLKEDTSFGGNLGRAVFQAKKRLLEPLGLVEEAAKTAPGKKRPVEQSPQEPDSSAGIGKSGAQPAKKRLNFGQTGDTESVPDPQPIGEPPAAPSGVGSLTMASGGGAPVADNNEGADGVGSSSGNWHCDSQWLGDRVITTSTRTWALPTYNNHLYKQISNSTSGGSSNDNAYFGYSTPWGYFDFNRFHCHFSPRDWQRLINNNWGFRPKRLNFKLFNIQVKEVTDNNGVKTIANNLTSTVQVFTDSDYQLPYVLGSAHEGCLPPFPADVFMIPQYGYLTLNDGSQAVGRSSFYCLEYFPSQMLRTGNNFQFSYEFENVPFHSSYAHSQSLDRLMNPLIDQYLYYLSKTINGSGQNQQTLKFSVAGPSNMAVQGRNYIPGPSYRQQRVSTTVTQNNNSEFAWPGASSWALNGRNSLMNPGPAMASHKEGEDRFFPLSGSLIFGKQGTGRDNVDADKVMITNEEEIKTTNPVATESYGQVATNHQSAQAQAQTGWVQNQGILPGMVWQDRDVYLQGPIWAKIPHTGGNFHPSPLMGGFGMKHPPPQILIKNTPVPADPPTAFNKDKLNSFITQYSTGQVSVEIEWELQKENSKRWNPEIQYTSNYYKSNNVEFAVNTGGVYSEPRPIGTRYLTRNL

SEQ ID NO: 599 - protein, 736 aa, Artificial Sequence
  source: /note="Description of Artificial Sequence: Synthetic polypeptide"
MAADGYLPDWLEDNLSEGIREWWALKPGAPQPKANQQHQDNARGLVLPGYKYLGPGNGLDKGEPVNAADAAALEHDKAYDQQLKAGDNPYLKYNHADAEFQERLKEDTSFGGNLGRAVFQAKKRLLEPLGLVEEAAKTAPGKKRPVEQSPQEPDSSAGIDKSGAQPAKKRLNFGQTGDTESVPDPQPIGEPPAAPSGVGSLTMASGGGAPVADNNEGADGVGSSSGNWHCDSQWLGDRVITTSTRTWALPTYNNHLYKQISNSTSGGSSNDNAYFGYSTPWGYFDFNRFHCHFSPRDWQRLINNNWGFRPKRLNFKLFNIQVKEVTDNNGVKTIANNLTSTVQVFTDSDYQLPYVLGSAHEGCLPPFPADVFMIPQYGYLTLNDGSQAVGRSSFYCLEYFPSQMLRTGNNFQFSYEFENVPFHSSYAHSQSLDRLMNPLIDQYLYYLSKTINGSGQNQQTLKFSVAGPSNMAVQGRNYIPGPSYRQQRVSTTVTQNNNSEFAWPGASSWALNGRNSLMNPGPAMASHKEGEDRFFPLSGSLIFGKQGTGRDNVDADKVMITNEEEIKTTNPVATESYGQVATNHQSAQAQAQTGWVQNQGILPGMVWQDRDVYLQGPIWAKIPHTDGNFHPSPLMGGFGMKHPPPQILIKNTPVPADPPTAFNKDKLNSFITQYSTGQVSVEIEWELQKENSKRWNPEIQYTSNYYKSNNVEFAVNTEGVYSEPRPIGTRYLTRNL

SEQ ID NO: 600 - protein, 736 aa, Artificial Sequence
  source: /note="Description of Artificial Sequence: Synthetic polypeptide"
MAADGYLPDWLEDNLSEGIREWWALKPGAPQPKANQQHQDNARGLVLPGYKYLGPGNGLDKGEPVNAADAAALEHDKAYDQQLKAGDNPYLKYNHADAEFQERLKEDTSFGGNLGRAVLQAKKRLLEPLGLVEEAAKTAPGKKRPVEQSPQEPDSSAGIGKSGAQPAKKRLNFGQTGDTESVPDPQPIGEPPAAPSGVGSLTMASGGGAPVADNNEGADGVGSSSGNWHCDSQWLGDRVITTSTRTWALPTYNNHLYKQISNSTSGGSSNDNAYFGYSTPWGYFDFNRFHCHFSPRDWQRLINNNWGFRPKRLNFKLFNIQVKEVTDNNGVKTIANNLTSTVQVFTDSDYQLPYVLGSAHEGCLPPFPADVFMIPQYGYLTLNDGSQAVGRSSFYCLEYFPSQMLRTGNNFQFSYEFENVPFHSSYAHSQSLDRLMNPLIDQYLYYLSKTINGSGQNQQTLKFSVAGSSNMAVQGRNYIPGPSYRQQRVSTTVTQNNNSEFAWPGASSWALNGRNSLMNPGPAMASHKEGEDRFFPLSGSLIFGKQGTGRDNVDADKVMITNEEEIKTTNPVATESYGQVATNHQSAQAQAQTGWVQNQGILPGMVWQDRDVYLQGPIWAKIPHTDGNFHPSPLMGGFGMKHPPPQILIKNTPVPADPPTAFNKDKLNSFITQYSTGQVSVEIEWELQKENSKRWNPEIQYTSNYYKSNNVEFAVNTEGVYSEPRPIGTRYLTRNL

SEQ ID NO: 601 - protein, 736 aa, Artificial Sequence
  source: /note="Description of Artificial Sequence: Synthetic polypeptide"
MAADGYLPDWLEDNLSEGIREWWALKPGAPQPKANQQHQDNARGLVLPGYKYLGPGNGLDKGEPVNAADAAALEHDRAYDQQLKAGDNPYLKYNHADAEFQERLKEDTSFGGNLGRAVFQAKKRLLEPLGLVEEAAKTAPGKKRPVEQSPQEPDSSAGIGKSGAQPAKKRLNFGQTGDTESVPDPQPIGEPPAAPSGVGSLTMASGGGAPVADNNEGADGVGSSSGNWHCDSQWLGDRVITTSTRTWALPTYNNHLYKQISNSTSGGSSNDNAYFGYSTPWGYFDFNRFHCHFSPRDWQRLINNNWGFRPKRLNFKLFNIQVKEVTDNNGVKTIANNLTSTVQVFTDSDYQLPYVLGSAHEGCLPPFPADVFMIPQYGYLTLNDGSQAVGRSSFYCLEYFPSQMLRTGNNFQFSYEFENVPFHSSYAHSQSLDRLMNPLIDQYLYYLSKTINGSGQNQQTLKFSVAGPSNMAVQGRNYIPGPSYRQQRVSTTVTQNNNSEFAWPGASSWALNGRNSLMNPGPAMASHKEGEDRFFPLSGSLIFGKQGTGRDNVDADKVMITNEEEIKTTNPVATESYGQVATNHQSAQAQAQTGWVQNQGILPGMVWQDRDVYLQGPIWAKIPHTDGNFHPSPLMGGFGMKHPPPQILIKNTPVPADPPTAFNKDKLNSFITQYSTGQVSVEIEWELQKKNSKRWNPEIQYTSNYYKSNNVEFAVNTEGVYSEPRPIGTRYLTRNL

SEQ ID NO: 602 - protein, 736 aa, Artificial Sequence
  source: /note="Description of Artificial Sequence: Synthetic polypeptide"
MAADGYLPDWLEDNLSEGIREWWALKPGAPQPKANQQHQDNARGLVLPGYKYLGPGNGLDKGEPVNAADAAALEHDKAYDQQLKAGDNPYLKYNHADAEFQERLKEDTSFGGNLGRAVFQAKKRLLEPLGLVEEAAKTAPGKKRPVEQSPQEPDSSAGIGKSGAQPAKKRLNFGQTGDTESVPDPQPIGEPPAAPSGVGSLTMASGGGAPVADNNEGADGVGSSSGNWHCDSQWLGDRVITTSTRTWALPTYNNHLYKQISNSTSGGSSNDNAYFGYSTPWGYFDFNRFHCHFSPRDWQRLINNNWGFRPKRLNFKLFNIQVKEVTDNNGVKTIANNLTSTVQVFTDSDYQLPYVLGSAHEGCLPPFPADVFMIPQYGYLTLNDGSQAVGRSSFYCLEYFPSQMLRTGNNFQFSYEFENVPFHSSYAHSQSLDRLMNPLIDQYLYYLSKTINGSGQNQQTLKFSVAGPSNMAVQGRNYIPGPSYRQQRVSTTVTQNNNSEFAWPGASSWALNGRNSLMNPGPAMASHKEGEDRFFPLSGSLIFGKQGTGRDNVDADKVMITNEEEIKTTNPVATESYGQVATNHQSAQARAQTGWVQNQGILPGMVWQDRDVYLQGPIWAKIPHTDGNFHPSPLMGGFGMKHPPPQILIKNTPVPADPPTAFNKDKLNSFITQYSTGQVSVEIEWELQKENSKRWNPEIQYTSNYYKSNNVEFAVNTEGVYSEPRPIGTRYLTRNL

SEQ ID NO: 603 - protein, 736 aa, Artificial Sequence
  source: /note="Description of Artificial Sequence: Synthetic polypeptide"
MAADGYLPDWLEDNLSEGIREWWALKPGAPQPKANQQHQDNARGLVLPGYKYLGPGNGLDKGEPVNAVDAAALEHDKAYDQQLKAGDNPYLKYNHADAEFQERLKEDTSFGGNLGRAVFQAKKRLLEPLGLVEEAAKTAPGKKRPVEQSPQEPDSSAGIGKSGAQPAKKRLNFGQTGDTESVPDPQPIGEPPAAPSGVGSLTMASGGGAPVADNNEGADGVGSSSGNWHCDSQWLGDRVITTSTRTWALPTYNNHLYKQISNSTSGGSSNDNAYFGYSTPWGYFDFNRFHCHFSPRDWQRLINNNWGFRPKRLNFKLFNIQVKEVTDNNGVKTIANNLTSTVQVFTDSDYQLPYVLGSAHEGCLPPFPADVFMIPQYGYLTLNDGSQAVGRSSFYCLEYFPSQMLRTGNNFQFSYEFENVPFHSSYAHSQSLDRLMNPLIDQYLYYLSKTINGSGQNQQTLKFSVAGPSNMAVQGRNYIPGPSYRQQRVSTTVTQNNNSEFAWPGASSWALNGRNSLMNPGPAMASHKEGEDRFFPLSGSLIFGKQGTGRDNVDADKVMITNEEEIKTTNPVATESYGQVATNHQSAQAQAQTGWVQNQGILPGMVWQDRDVYLQGPIWAKIPHTDGNFHPSPLMGGFGMKHPPPQILIKNTPVPADPPTAFNKDKLNSFITQYSTGQVSVEIEWELQKENSKRWNPEIQYTSNYYKSNNVEFAVNTEGVYSEPRPIGTRYLTRNL

SEQ ID NO: 604 - protein, 736 aa, Artificial Sequence
  source: /note="Description of Artificial Sequence: Synthetic polypeptide"
MAADGYLPDWLEDNLSEGIREWWALKPGAPQPKANQQHQDNARGLVLPGYKYLGPGNGLDKGEPVNAADAAALEHDKAYDQQLKAGDNPYLKYNHADAEFQERLKEDTSFGGNLGRAVFQAKKRLLEPLGLVEEAAKTAPGKKRPVEQSPREPDSSAGIGKSGAQPAKKRLNFGQTGDTESVPDPQPIGEPPAAPSGVGSLTMASGGGAPVADNNEGADGVGSSSGNWHCDSQWLGDRVITTSTRTWALPTYNNHLYKQISNSTSGGSSNDNAYFGYSTPWGYFDFNRFHCHFSPRDWQRLINNNWGFRPKRLNFKLFNIQVKEVTDNNGVKTIANNLTSTVQVFTDSDYQLPYVLGSAHEGCLPPFPADVFMIPQYGYLTLNDGSQAVGRSSFYCLEYFPSQMLRTGNNFQFSYEFENVPFHSSYAHSQSLDRLMNPLIDQYLYYLSKTINGSGQNQQTLKFSVAGPSNMAVQGRNYIPGPSYRQQRVSTTVTQNNNSEFAWPGASSWALNGRNSLMNPGPAMASHKEGEDRFFPLSGSLIFGKQGTGRDNVDADKVMITNEEEIKTTNPVATESYGQVATNHQSAQAQAQTGWVQNQGILPGMVWQDRDVYLQGPIWAKIPHTDGNFHPSPLMGGFGMKHPPPQILIKNTPVPADPPTAFNKDKLNSFITQYSTGQVSVEIEWELQKENSKRWNPEIQYTSNYYKSNNVEFAVNTEGVYSEPRPIGTRYLTRNL

SEQ ID NO: 605 - protein, 736 aa, Artificial Sequence
  source: /note="Description of Artificial Sequence: Synthetic polypeptide"
MAADGYLPDWLEDNLSEGIREWWALKPGAPQPKANQQHQDNARGLVLPGYKYLGPGNGLDKGEPVNAADAAALEHDKAYDQQLKAGDNPYLKYNHADAEFQERLKEDTSFGGNLGRAVFQAKKRLLEPLGLVEEAAKTAPGKKRPVEQSPQEPDSSAGIGKSGAQPAKKRLNFGQTGDTESVPDPQPIGEPPAAPSGVGSLTMASCGGAPVADNNEGADGVGSSSGNWHCDSQWLGDRVITTSTRTWALPTYNNHLYKQISNSTSGGSSNDNAYFGYSTPWGYFDFNRFHCHFSPRDWQRLINNNWGFRPKRLNFKLFNIQVKEVTDNNGVKTIANNLTSTVQVFTDSDYQLPYVLGSAHEGCLPPFPADVFMIPQYGYLTLNDGSQAVGRSSFYCLEYFPSQMLRTGNNFQFSYEFENVPFHSSYAHSQSLDRLMNPLIDQYLYYLSKTINGSGQNQQTLKFSVAGPSNMAVQGRNYIPGPSYRQQRVSTTVTQNNNSEFAWPGASSWALNGRNSLMNPGPAMASHKEGEDRFFPLSGSLIFGKQGTGRDNVDADKVMITNEEEIKTTNPVATESYGQVATNHQSAQAQAQTGWVQNQGILPGMVWQDRDVYLQGPIWAKIPHTDGNFHPSPLMGGFGMKHPPPQILIKNTPVPADPPTAFNKDKLNSFITQYSTGQVSVEIEWELQKENSKRWNPEIQYTSNYYKSNNVEFAVNTEGVYSEPRPIGTRYLTRNL

SEQ ID NO: 606 - protein, 736 aa, Artificial Sequence
  source: /note="Description of Artificial Sequence: Synthetic polypeptide"
MAADGYLPDWLEDNLSEGIREWWALKPGAPQPKANQQHQDNARGLVLPGYKYLGPGNGLDKGEPINAADAAALEHDKAYDQQLKAGDNPYLKYNHADAEFQERLKEDTSFGGNLGRAVFQAKKRLLEPLGLVEEAAKTAPGKKRPVEQSPQEPDSSAGIGKSGAQPAKKRLNFGQTGDTESVPDPQPIGEPPAAPSGVGSLTMASGGGAPVADNNEGADGVGSSSGNWHCDSQWLGDRVITTSTRTWALPTYNNHLYKQISNSTSGGSSNDNAYFGYSTPWGYFDFNRFHCHFSPRDWQRLINNNWGFRPKRLNFKLFNIQVKEVTDNNGVKTIANNLTSTVQVFTDSDYQLPYVLGSAHEGCLPPFPADVFMIPQYGYLTLNDGSQAVGRSSFYCLEYFPSQMLRTGNNFQFSYEFENVPFHSSYAHSQSLDRLMNPLIDQYLYYLSKTINGSGQNQQTLKFSVAGPSNMAVQGRNYIPGPSYRQQRVSTTVTQNNNSEFAWPGASSWALNGRNSLMNPGPAMASHKEGEDRFFPLSGSLIFGKQGTGRDNVDADKVMITNEEEIKTTNPVATESYGQVATNHQSAQAQAQTGWVQNQGILPGMVWQDRDVYLQGPIWAKIPHTYGNFHPSPLMGGFGMKHPPPQILIKNTPVPADPPTAFNKDKLNSFITQYSTGQVSVEIEWELQKENSKRWNPEIQYTSNYYKSNNVEFAVNTEGVYSEPRPIGTRYLTRNL

SEQ ID NO: 607 - protein, 736 aa, Artificial Sequence
  source: /note="Description of Artificial Sequence: Synthetic polypeptide"
MAADGYLPDWLEDNLSEGIREWWALKPGAPQPKANQQHQDNARGLVLPGYKYLGPGNGLDKGEPVNAADAAALEHDKAYDQQLKAGDNPYLKYNHADAEFQERLKEDTSFGGNLGRAVFQAKKRLLEPLGLVEEAAKTAPGKKRPVEQSPQEPDSSAGIGKSGAQPAKKRLNFGQTGDTESVPDPQPIGEPPAAPSGVGSLTMASGGGAPVADNNEGADGVGSSSGNWHCDSQWLGDRVITTSTRTWALPTYNNHLYKQISNSTSGGSSNDNAYFGYSTPWGYFDFNRFHCHFSPHDWQRLINNNWGFRPKRLNFKLFNIQVKEVTDNNGVKTIANNLTSTVQVFTDSDYQLPYVLGSAHEGCLPPFPADVFMIPQYGYLTLNDGSQAVGRSSFYCLEYFPSQMLRTGNNFQFSYEFENVPFHSSYAHSQSLDRLMNPLIDQYLYYLSKTINGSGQNQQTLKFNVAGPSNMAVQGRNYIPGPSYRQQRVSTTVTQNNNSEFAWPRASSWALNGRNSLMNPGPAMASHKEGEDRFFPLSGSLIFGKQGTGRDNVDADKVMITNEEEIKTTNPVATESYGQVATNHQSAQAQAQTGWVQNQGILPGMVWQDRDVYLQGPIWAKIPHTDGNFHPSPLMGGFGMKHPPPQILIKNTPVPADPPTAFNKDKLNSFITQYSTGQVSMEIEWELQKENSKRWNPEIQYTSNYYKSNNVEFAVNTEGVYSEPRPIGTRYLTRNL

SEQ ID NO: 608 - protein, 736 aa, Artificial Sequence
  source: /note="Description of Artificial Sequence: Synthetic polypeptide"
MAADGYLPDWLEDNLSEGIREWWALKPGAPQPKANQQHQDNARGLVLPGYKYLGPGNGLDKGEPVNAADAAALEHDKAYDQQLKAGDNPYLKYNHADAEFQERLKEDTSFGGNLGRAVFQAKKRLLEPLGLVEEAAKTAPGKKRPVEQSPQEPDSSAGIGKSGAQPAKKRLNFGQTGDTESVPDPQPIGEPPAAPSGVGSLTMASGGGAPVADNNEGADGVGSSSGNWHCDSQWLGDRVITTSTRTWALPTYNNHLYKQISNSTSGGSSNDNAYFGYSTPWGYFDFNRFHCHFSPRDWQRLINNNWGFRPKRLNFKLFNIQVKEVTDNNGVKTIANNLTSTVQVFTDSDYQLPYVLGSAHEGCLPPFPADVFMIPQYGYLTLNDGSQAVGRSSFYCLEYFPSQMLRTGNNFQFSYEFENVPFHSSYAHSQSLDRLMNPLIDQYLYYLSKTINGSGQNQQTLKFSVAGPSNMAVQGRNYIPGPSYRQQRVSTTVTQNNNSEFAWPRASSWALNGRNSLMNPGPAMASHKEGEDRFFPLSGSLIFGKQGTGRDNVDADKVMITNEEEIKTTNPVATESYGQVATNHQSAQAQAQTGWVQNQGILPGMVWQDRDVYLQGPIWAKIPHTDGNFHPSPLMGGFGMKHPPPQILIKNTPVPADPPTAFNKDKLNSFITQYSTGQVSVEIEWELQKENSKRWNPEIQYTSNYYKSNNVEFAVNTEGVYSEPRPIGTRYLTRNL

SEQ ID NO: 609 - protein, 736 aa, Artificial Sequence
  source: /note="Description of Artificial Sequence: Synthetic polypeptide"
MAADGYLPDWLEDNLSEGIREWWALKPGAPQPKANQQHQDNARGLVLPGYKYLGPGNGLDKGEPVNAADAAALEHDKAYDQQLKAGDNPYLKYNHADAEFQERLKEDTSFGGNLGRAVFQAKKRLLEPLGLVEEAAKTAPGKKRPVEQSPQEPDSSAGIGKSGAQPAKKRLNFGQTGDTESVPDPQPIGEPPAAPSGVGSLTMASGGGAPVADNNEGADGVGSSSGNWHCDSQWLGDRVITTSTRTWALPTYNNHLYKQISNSTSGGSSNDNAYFGYSTPWGYFDFNRFHCHFSPRDWQRLINNNWGFRPKRLNFKLFNIQVKEVTDNNGVKTIANNLTSTVQVFTDSDYQLPYVLGSAHEGCLPPFPADVFMIPQYGYLTLNDGSQAVGRSSFYCLEYFPSQMLRTGNNFQFSYEFENVPFHSSYAHSQSLDRLMNPLIDQYLYYLSKTINGSGQNQQTLKFSVAGPSNMAVQGRNYIPGPSYRQQRVSTTVTQNNNSEFAWPRASSWALNGRNSLMNPGPAMASHKEGEDRFFPLSGSLIFGKQGTGRDNVDADKVMITNEEEIKTTNPVATESYGQVATNHQSAQAQAQTGWVQNQGILPGMVWQDRDVYLQGPIWAKIPHTDGNFHPSPLMGGFGMKHPPPQILIKNTPVPADPPTAFNKDKLNSFITQYSTGQVSVEIEWERQKENSKRWNPEIQYTSNYYKSNNVEFAVNTEGVYSEPRPIGTRYLTRNL

SEQ ID NO: 610 - protein, 736 aa, Artificial Sequence
  source: /note="Description of Artificial Sequence: Synthetic polypeptide"
MAADGYLPDWLEDNLSEGIREWWALKPGAPQPKANQQHQDNARGLVLPGYKYLGPGNGLDKGEPVNAADAAALEHDKAYDQQLKAGDNPYLKYNHADAEFQERLKEDTSFGGNLGRAVFQAKKRLLEPLGLVEEAAKTAPGKKRPVEQSPQEPDSSAGIGKSGAQPAKKRLNFGQTGDTESVPDPQPIGEPPAAPSGVGSLTMASGGGAPVADNNEGADGVGSSSGNWHCDSQWLGDRVITTSTRTWALPTYNNHLYKQISNSTSGGSSNDNAYFGYSTPWGYFDFNRFHCHFSPRDWQRLINNNWGFRPKRLNFKLFNIQVKEVTDNNGVKTIANNLTSTVQVFADSDYQLPYVLGSAHEGCLPPFPADVFMIPQYGYLTLNDGSQAVGRSSFYCLEYFPSQMLRTGNNFQFSYEFENVPFHSSYAHSQSLDRLMNPLIDQYLYYLSKTINGSGQNQQTLKFSVAGPSNMAVQGRNYIPGPSYRQQRVSTTVTQNNNSEFAWPRASSWALNGRNSLMNPGPAMASHKEGEDRFFPLSGSLIFGKQGTGRDNVDADKVMITNEEEIKTTNPVATESYGQVATNHQSAQAQAQTGWVQNQGILPGMVWQDRDVYLQGPIWAKIPHTDGNFHPSPLMGGFGMKHPPPQILIKNTPVPADPPTAFNKDKLNSFITQYSTGQVSVEIEWELQKENSKRWNPEIQYTSNYYKSNNVEFAVNTEGVYSEPRPIGTRYLTRNL

SEQ ID NO: 611 - protein, 736 aa, Artificial Sequence
  source: /note="Description of Artificial Sequence: Synthetic polypeptide"
MAADGYLPDWLEDNLSEGIREWWALKPGAPQPKANQQHQDNARGLVLPGYKYLGPGNGLDKGEPVNAADAAALEHDKAYDQQLKAGDNPYLKYNHADAEFQERLKEDTSFGGNLGRAVFQAKKRLLEPLGLVEEAAKTAPGKKRPVEQSPQEPDSSAGIGKSGAQPAKKRLNFGQTGDTESVPDPQPIGEPPAAPSGVGSLTMASGGGAPVADNNEGADGVGSSSGNWHCDSQWLGDRVITTSTRTWALPTYNNHLYKQISNSTSGGSSNDNAYFGYSTPWGYFDFNRFHCHFSPRDWQRLINNNWGFRPKRLNFKLFNIQVKEVTDNNGVKTIANNLTSTVQVFTDSDYQLPYVLGSAHEGCLPPFPADVFMIPQYGYLTLNDGSQAVGRSSFYCLEYFPSQMLRTGNNFQFSYEFENVPFHSSYAHSQSLDRLMNPLIDQYLYYLSKTINGSGQNQQTLKFSVAGPSNMAVQGRNYIPGPSYRQQRVSTTVTQNNNSEIAWPRASSWALNGRNSLMNPGPAMASHKEGEDRFFPLSGSLIFGKQGTGRDNVDADKVMITNEEEIKTTNPVATESYGQVATNHQSAQAQAQTGWVQNQGILPGMVWQDRDVYLQGPIWAKIPHTDGNFHPSPLMGGFGMKHPPPQILIKNTPVPADPPTAFNKDKLNSFITQYSTGQVSVEIEWELQKENSKRWNPEIQYTSNYCKSNNVEFAVNTEGVYSEPRPIGTRYLTRNL

SEQ ID NO: 612 - protein, 736 aa, Artificial Sequence; identical to SEQ ID NO: 608
  source: /note="Description of Artificial Sequence: Synthetic polypeptide"

SEQ ID NO: 613 - DNA, 2208 bp, Artificial Sequence
  source: /note="Description of Artificial Sequence: Synthetic polynucleotide"
atggctgccgatggttatcttccagattggctcgaggacaaccttagtgaaggaattcgcgagtggtgggctttgaaacctggagcccctcaacccaaggcaaatcaacaacatcaagacaacgctcgaggtcttgtgcttccgggttacaaataccttggacccggcaacggactcgacaagggggagccggtcaacgcagcagacgcggcggccctcgagcacgacaaggcctacgaccagcagctcaaggccggagacaacccgtacctcaagtacaaccacgccgacgccgagttccaggagcggctcaaagaagatacgtcttttgggggcaacctcgggcgagcagtcttccaggccaaaaagaggcttcttgaacctcttggtctggttgaggaagcggctaagacggctcctggaaagaagaggcctgtagagcagtctcctcaggaaccggactcctccgcgggtattggcaaatcgggtgcacagcccgctaaaaagagactcaatttcggtcagactggcgacacagagtcagtcccagaccctcaaccaatcggagaacctcccgcagccccctcaggtgtgggatctcttacaatggcttcaggtggtggcgcaccagtggcagacaataacgaaggtgccgatggagtgggtagttcctcgggaaattggcattgcgattcccaatggctgggggacagagtcatcaccaccagcacccgaacctgggccctgcccacctacaacaatcacctctacaagcaaatctccaacagcacatctggaggatcttcaaatgacaacgcctacttcggctacagcaccccctgggggtattttgacttcaacagattccactgccacttctcaccacgtgactggcagcgactcatcaacaacaactggggattccggcctaagcgactcaacttcaagctcttcaacattcaggtcaaagaggttacggacaacaatggagtcaagaccatcgccaataaccttaccagcacggtccaggtcttcacggactcagactatcagctcccgtacgtgctcgggtcggctcacgagggctgcctcccgccgttcccagcggacgttttcatgattcctcagtacgggtatctgacgcttaatgatggaagccaggccgtgggtcgttcgtccttttactgcctggaatatttcccgtcgcaaatgctaagaacgggtaacaacttccagttcggctacgagtttgagaacgtacctttccatagcagctacgctcacagccaaagcctggaccgactaatgaatccactcatcgaccaatacttgtactatctctcaaagactattaacggttctggacagaatcaacaaacgctaaaattcagtgtggccggacccagcaacatggctgtccagggaagaaactacatacctggacccagctaccgacaacaacgtgtctcaaccactgtgactcaaaacaacaacagcgaatttgcttggcctggagcttcttcttgggctctcaatggacgtaatagcttgatgaatcctggacctgctatggccagccacaaagaaggagaggaccgtttctttcctttgtctggatctttaatttttggcaaacaaggaactggaagagacaacgtggatgcggacaaagtcatgataaccaacgaagaagaaattaaaactactaacccggtagcaacggagtcctatggacaagtggccacaaaccaccagagtgcccaagcacaggcgcagaccggctgggttcaaaaccaaggaatacttccgggtatggtttggcaggacagagatgtgtacctgcaaggacccatttgggccaaaattcctcacacggacggcaactttcacccttctccgctgatgggagggtttggaatgaagcacccgcctcctcagatcctcatcaaaaacacacctgtacctgcggatcctccaacggccttcaacaaggacaagctgaactctttcatcacccagtattctactggccaagtcagcgtggagatcgagtgggagctgcagaaggaaaacagcaagcgctgggacccggagatccagtacacttccaactattacaagtctaataatgttgaatttgctgttaatactgaaggtgtatatagtgaaccccgccccattggcaccagatacctgactcgtaatctg

SEQ ID NO: 614 - DNA, 2208 bp, Artificial Sequence
  source: /note="Description of Artificial Sequence: Synthetic polynucleotide"
atggctgccgatggttatcttccagattggctcgaggacaaccttagtgaaggaattcgcgagtggtgggctttgaaacctggagcccctcaacccaaggcaaatcaacaacatcaagacaacgctcgaggtcttgtgcttccgggttacaaataccttggacccggcaacggactcgacaagggggagccggtcaacgcagcagacgcggcggccctcgagcacgacaaggcctacgaccagcagctcaaggccggagacaacccgtacctcaagtacaaccacgccgacgccgagttccaggagcggctcaaagaagatacgtcttttgggggcaacctcgggcgagcagtcttccaggccaaaaagaggcttcttgaacctcttggtctggttgaggaagcggctaagacggctcctggaaagaagaggcctgtagagcagtctcctcaggaaccggactcctccgcgggtattggcaaatcgggtgcacagcccgctaaaaagagactcaatttcggtcagactggcgacacagagtcagtcccagaccctcaaccaatcggagaacctcccgcagccccctcaggtgtgggatctcttacaatggcttcaggtggtggcgcaccagtggcagacaataacgaaggtgccgatggagtgggtagttcctcgggaaattggcattgcgattcccaatggctgggggacagagtcatcaccaccagcacccgaacctgggccctgcccacctacaacaatcacctctacaagcaaatctccaacagcacatctggaggatcttcaaatgacaacgcctacttcggctacagcaccccctgggggtattttgacttcaacagattccactgccgcttctcaccacgtgactggcagcgactcatcaacaacaactggggattccggcctaagcgactcaacttcaagctcttcaacattcaggtcaaagaggttacggacaacaatggagtcaagaccatcgccaataaccttaccagcacggtccaggtcttcacggactcagactatcagctcccgtacgtgctcgggtcggctcacgagggctgcctcccgccgttcccagcggacgttttcatgattcctcagtacgggtatctgacgcttaatgatggaagccaggccgtgggtcgttcgtccttttactgcctggaatatttcccgtcgcaaatgctaagaacgggtaacaacttccagttcagctacgagtttgagaacgtacctttccatagcagctacgctcacagccaaagcctggaccgactaatgaatccactcatcgaccaatacttgtactatctctcaaagactattaacggttctggacagaatcaacaaacgctaaaattcagtgtggccggacccagcaacatggctgtccagggaagaaactacatacctggacccagctaccgacaacaacgtgtctcaaccactgtgactcaaaacaacaacagcgaatttgcttggcctggagcttcttcttgggctctcaatggacgtaatagcttgatgaatcctggacctgctatggccagccacaaagaaggagaggaccgtttctttcctttgtctggatctttaatttttggcaaacaaggaactggaagagacaacgtggatgcggacaaagtcatgataaccaacgaagaagaaattaaaactactaacccggtagcaacggagtcctatggacaagtggccacaaaccaccagagtgcccaagcacaggcgcagaccggctgggttcaaaaccaaggaatacttccgggtatggtttggcaggacagagatgtgtacctgcaaggacccatttgggccaaaattcctcacacggacggcaactttcacccttctccgctgatgggagggtttggaatgaagcacccgcctcctcagatcctcatcaaaaacgcccctgtacctgcggatcctccaacggccttcaacaaggacaagctgaactctttcatcacccagtattctactggccaagtcagcgtggagatcgagtgggagctgcagaaggaaaacagcaagcgctggaacccggagatccagtacacttccaactattacaagtctaataatgttgaatttgctgttaatactgaaggtgtatatagtgaaccccgccccattggcaccagatacctgactcgtaatctg

SEQ ID NO: 615 - DNA, 2208 bp, Artificial Sequence
  source: /note="Description of Artificial Sequence: Synthetic polynucleotide"
atggctgccgatggttatcttccagattggctcgaggacaaccttagtgaaggaattcgcgagtggtgggctttgaaacctggagcccctcaacccaaggcaaatcaacaacatcaagacaacgctcgaggtcttgtgcttccgggttacaaataccttggacccggcaacggactcgacaagggggagccggtcagcgcagcagacgcggcggccctcgagcacgacaaggcctacgaccagcagctcaaggccggagacaacccgtacctcaagtacaaccacgccgacgccgagttccaggagcggctcaaagaagatacgtcttttgggggcaacctcgggcgagcagtcttccaggccaaaaagaggcttcttgaacctcttggtctggttgaggaagcggctaagacggctcctggaaagaagaggcctgtagagcagtctcctcaggaaccggactcctccgcgggtattggcaaatcgggtgcacagcccgctaaaaagagactcaatttcggtcagactggcgacacagagtcagtcccagaccctcaaccaatcggagaacctcccgcagccccctcaggtgtgggatctcttacaatggcttcaggtggtggcgcaccagtggcagacaataacgaaggtgccgatggagtgggtagttcctcgggaaattggcattgcgattcccaatggctgggggacagagtcatcaccaccagcacccgaacctgggccctgcccacctacaacaatcacctctacaagcaaatctccaacagcacatctggaggatcttcaaatgacaacgcctacttcggctacagcaccccctgggggtattttgacttcaacagattccactgccacttctcaccgcgtgactggcagcgactcatcaacaacaactggggattccggcctaagcgactcaacttcaagctcttcaacattcaggtcaaagaggttacggacaacaatggagtcaagaccatcgccaataaccttaccagcacggtccaggtcttcacggactcagactatcagctcccgtacgtgctcgggtcggctcacgagggctgcctcccgccgttcccagcggacgttttcatgattcctcagtacgggtatctgacgcttaatgatggaagccaggccgtgggtcgttcgtccttttactgcctggaatatttcccgtcgcaaatgctaagaacgggtaacaacttccagttcagctacgagtttgagaacgtacctttccatagcagctacgctcacagccaaagcctggaccgactaatgaatccactcatcgaccaatacttgtactatctctcaaagactattaacggttctggacagaatcaacaaacgctaaaattcagtgtggccggacccagcaacatggctgtccagggaagaaactacatacctggacccagctaccgacaacaacgtgtctcaaccactgtgactcaaaacaacaacagcgaatttgcttggcctggagcttcttcttgggctctcaatggacgtaatagcttgatgaatcctggacctgctatggccagccacaaagaaggagaggaccgtttctttcctttgtctggatctttaatttttggcaaacaaggaactggaagagacaacgtggatgcggacaaagtcatgataaccaacgaagaagaaattaaaactactaacccggtagcaacggagtcctatggacaagtggccacaaaccaccagagtgcccaagcacaggcgcagaccggctgggttcaaaaccaaggaatacttccgggtatggtttggcaggacagagatgtgtacctgcaaggacccatttgggccaaaattcctcacacggacggcaactttcacccttctccgctgatgggagggtttggaatgaagcacccgcctcctcagatcctcatcaaaaacacacctgtacctgcggatcctccaacggccttcaacaaggacaagctgaactctttcatcacccagtattctactggccaagtcagcgtggagatcgagtgggagctgcagaaggaaaacagcaagcgctggaacccggagatccagtacacttccaactattacaagtctaataatgttgaatttgctgttaatactgaaggtgtatatagtgaaccccgccccattggcaccagatacctgactcgtaatctg

SEQ ID NO: 616 - DNA, 2208 bp, Artificial Sequence
  source: /note="Description of Artificial Sequence: Synthetic polynucleotide"
atggctgccgatggttatcttccagattggctcgaggacaaccttagtgaaggaattcgcgagtggtgggctttgaaacctggagcccctcaacccaaggcaaatcaacaacatcaagacaacgctcgaggtcttgtgcttccgggttacaaataccttggacccggcaacggactcgacaagggggagccggtcaacgcagcagacgcggcggccctcgagcacgacaaggcctacgaccagcagctcaaggccggagacaacccgtacctcaagtacaaccacgccgacgccgagttccaggagcggctcaaagaagatacgtcttttgggggcaacctcgggcgagcagtcttccaggccaaaaagaggcttcttgaacctcttggtctggttgaggaagcggctaagacggctcctggaaagaagaggcctgtagagcagtctcctcaggaaccggactcctccgcgggtattggcaaatcgggtgcacagcccgctaaaaagagactcaatttcggtcagactggcgacacagagtcagtcccagaccctcaaccaatcggagaacctcccgcagccccctcaggtgtgggatctcttacaatggcttcaggtggtggcgcaccagtggcagacaataacgaaggtgccgatggagtgggtagttcctcgggaaattggcattgcgattcccaatggctgggggacagagtcatcaccaccagcacccgaacctgggccctgcccacctacaacaatcacctctacaagcaaatctccaacagcacatctggaggatcttcaaatgacaacgcctacttcggctacagcaccccctgggggtattttgacttcaacagattccactgccacttctcaccacgtgactggcagcgactcatcaacaacaactggggattccggcctaagcgactcaacttcaagctcttcaacattcaggtcaaagaggttacggacaacaatggagtcaagaccatcgccaataaccttaccagcacggtccaggtcttcacggactcagactatcagctcccgtacgtgctcgggtcggctcacgagggctgcctcccgccgttcccagcggacgttttcatgattcctcagtacgggtatctgacgcttaatgatggaagccaggccgtgggtcgttcgtccttttactgcctggaatatttcccgtcgcaaatgctaagaacgggtaacaacttccagttcagctacgagtttgagaacgtacctttccatagcagctacgctcacagccaaagcctggaccgactaatgaatccactcatcgaccaatacttgtactatctctcaaagactattaacggttctggacagaatcaacaaacgctaaaattcagtgtggccggacccagcaacacggctgtccagggaagaaactacatacctggacccagctaccgacaacaacgtgtctcaaccactgtgactcaaaacaacaacagcgaatttgcttggcctggagcttcttcttgggctctcaatggacgtaatagcttgatgaatcctggacctgctatggccagccacaaagaaggagaggaccgtttctttcctttgtctggatctttaatttttggcaaacaaggaactggaagagacaacgtggatgcggacaaagtcatgataaccaacgaagaagaaattaaaactactaacccggtagcaacggagtcctatggacaagtggccacaaaccaccagagtgcccaagcacaggcgcagaccggctgggttcaaaaccaaggaatacttccgggtatggtttggcaggacagagatgtgtacctgcaaggacccatttgggccaaaattcctcacacggacggcaactttcacccttctccgctgatgggagggtttggaatgaagcacccgcctcctcagatcctcatcaaaaacacacctgtacctgcggatcctccaacggccttcaacaaggacaagctgaactctttcatcacccagtattctactggccaagtcagcgtggagatcgagtgggagctgcagaaggaaaacagcaagcgctggaacccggagatccagtacacttccaactattacaagtctaataatgttgaatttgctgttaatactgaaggtgtatatagtgaaccccgccccattggcaccagatacctgactcgtaatctg

SEQ ID NO: 617 - DNA, 2208 bp, Artificial Sequence
  source: /note="Description of Artificial Sequence: Synthetic polynucleotide"
atggctgccgatggttatcttccagattggctcgaggacaaccttagtgaaggaattcgcgagtggtgggctttgaaacctggagcccctcaacccaaggcaaatcaacaacatcaagacaacgctcgaggtcttgtgcttccgggttacaaataccttggacccggcaacggactcgacaagggggagccggtcaacgcagcagacgcggcggccctcgagcacgacaaggcctacgaccagcagctcaaggccggagacaacccgtacctcaagtacaaccacgccgacgccgagttccaggagcggctcaaagaagatacgtcttttgggggcaacctcgggcgagcagtcttccaggccaaaaagaggcttcttgaacctcttggtctggttgaggaagcggctaagacggctcctggaaagaagaggcctgtagagcagtctcctcaggaaccggactcctccgcgggtattggcaaatcgggtgcacagcccgctaaaaagagactcaatttcggtcagactggcgacacagagtcagtcccagaccctcaaccaatcggagaacctcccgcagccccctcaggtgtgggatctcttacaatggcttcaggtggtggcgcaccagtggcagacaataacgaaggtgccgatggagtgggtagttcctcgggaaattggcattgcgattcccaatggctgggggacagagtcatcaccaccagcacccgaacctgggccctgcccacctacaacaatcacctctacaagcaaatctccaacagcacatctggaggatcttcaaatgacaacgcctacttcggctacagcaccccctgggggtattttgacttcaacagattccactgccacttctcaccacgtgactggcagcgactcatcaacaacaactggggattccggcctaagcggctcaacttcaagctcttcaacattcaggtcaaagaggttacggacaacaatggagtcaagaccatcgccaataaccttaccagcacggtccaggtcttcacggactcagactatcagctcccgtacgtgctcgggtcggctcacgagggctgcctcccgccgttcccagcggacgttttcatgattcctcagtacgggtatctgacgcttaatgatggaagccaggccgtgggtcgttcgtccttttactgcctggaatatttcccgtcgcaaatgctaagaacgggtagcaacttccagttcagctacgagtttgagaacgtacctttccatagcagctacgctcacagccaaagcctggaccgactaatgaatccactcatcgaccaatacttgtactatctctcaaagactattaacggttctggacagaatcaacaaacgctaaaattcagtgtggccggacccagcaacatggctgtccagggaagaaactacatacctggacccagctaccgacaacaacgtgtctcaaccactgtgactcaaaacaacaacagcgaatttgcttggcctggagcttcttcttgggctctcaatggacgtaatagcttgatgaatcctggacctgctatggccagccacaaagaaggagaggaccgtttctttcctttgtctggatctttaatttttggcaaacaaggaactggaagagacaacgtggatgcggacaaagtcatgataaccaacgaagaagaaattaaaactactaacccggcagcaacggagtcctatggacaagtggccacaaaccaccagagtgcccaagcacaggcgcagaccggctgggttcaaaaccaaggaatacttccgggtatggtttggcaggacagagatgtgtacctgcaaggacccatttgggccaaaattcctcacacggacggcaactttcacccttctccgctgatgggagggtttggaatgaagcacccgcctcctcagatcctcatcaaaaacacacctgtacctgcggatcctccaacggccttcaacaaggacaagctgaactctttcatcacccagtattctactggccaagtcagcgtggagatcgagtgggagctgcagaaggaaaacagcaagcgctggaacccggagatccagcacacttccaactattacaagtctaataatgttgaatttgctgttaatactgaaggtgtatatagtgaaccccgccccattggcaccagatacctgactcgtaatctg

SEQ ID NO: 618 - DNA, 2208 bp, Artificial Sequence
  source: /note="Description of Artificial Sequence: Synthetic polynucleotide"
atggctgccgatggttatcttccagattggctcgaggacaaccttagtgaaggaattcgcgagtggtgggctttgaaacctggagcccctcaacccaaggcaaatcaacaacatcaagacaacgctcgaggtcttgtgcttccgggttacaaataccttggacccggcaacggactcgacaagggggagccggtcaacgcagcagacgcggcggccctcgagcacgacaaggcctacgaccagcagctcaaggccggagacaacccgtacctcaagtacaaccacgccgacgccgagttccaggagcggctcaaagaagatacgtcttttgggggcaacctcgggcgagcagtcttccaggccaaaaagaggcttcttgaacctcttggtctggttgaggaagcggctaagacggctcctggaaagaagaggcctgtagagcagtctcctcaggaaccggactcctccgcgggtattggcaaatcgggtgcacagcccgctaaaaagagactcaatttcggtcagactggcgacacagagtcagtcccagaccctcaaccaatcggagaacctcccgcagccccctcaggtgtgggatctcttacaatggcttcaggtggtggcgcaccagtggcagacaataacgaaggtgccgatggagtgggtagttcctcgggaaattggcattgcgattcccaatggctgggggacagagtcatcaccaccagcacccgaacctgggccctgcccacctacaacaatcacctctacaagcaaatctccaacagcacatctggaggatcttcaaatgacaacgcctacttcggctacagcaccccctgggggtattttgacttcaacagattccactgccacttctcaccacgtgactggcagcgactcatcaacaacaactggggattccggcctaagcgactcaacttcaggctcttcaacattcaggtcaaagaggttacggacaacaatggagtcaagaccatcgccaataaccttaccagcacggtccaggtcttcacggactcagactatcagctcccgtacgtgctcgggtcggctcacgagggctgcctcccgccgttcccagcggacgttttcatgattcctcagtacgggtatctgacgcttaatgatggaagccaggccgtgggtcgttcgtccttttactgcctggaatatttcccgtcgcaaatgctaagaacgggtaacaacttccagttcagctacgagtttgagaacgtacctttccatagcagctacgctcacagccaaagcctggaccgactaatgaatccactcatcgaccaatacttgtactatctctcaaagactattaacggttctggacagaatcaacaaacgctaaaattcagtgtggccggacccagcaacatggctgtccagggaagaaactacatacctggacccagctaccgacaacaacgtgtctcaaccactgtgactcaaaacaacaacagcgaatttgcttggcctggagcttcttcttgggctctcaatggacgtaatagcttgatgaatcctggacctgctatggccagccacaaagaaggagaggaccgtttctttcctttgtctggatctttaatttttggcaaacaaggaactggaagagacaacgtggatgcggacaaagtcatgataaccaacgaagaagaaattaaaactactaacccggtagcaacggagtcctatggacaagtggccacaaaccaccagagtgcccaagcacaggcgcagaccggctgggttcaaagccaaggaatacttccgggtatggtttggcaggacagagatgtgtacctgcaaggacccatttgggccaaaattcctcacacggacggcaactttcacccttctccgctgatgggagggtttggaatgaagcacccgcctccccagatcctcatcaaaaacacacctgtacctgcggatcctccaacggccttcaacaaggacaagctgaactctttcatcacccagtattctactggccaagtcagcgtggagatcgagtgggagctgcagaaggaaaacagcaagcgctggaacccggagatccagtacacttccaactattacaagtctaataatgttgaatttgctgttaatactgaaggtgtatatagtgaaccccgccccattggcaccagatacctgactcgtaatctg

SEQ ID NO: 619 - DNA, 2205 bp, Artificial Sequence
  source: /note="Description of Artificial Sequence: Synthetic polynucleotide"
atggctgccgatggttatcttccagattggctcgaggacaaccttagtgaaggaattcgcgagtggtgggctttgaaacctggagcccctcaacccaaggcaaatcaacaacatcaagacaacgcccgaggtcttgtgcttccgggttacaaataccttggacccggcaacggactcgacaagggggagccggtcaacgcagcagacgcggcggccctcgagcacgacaaggcctacgaccagcagctcaaggccggagacaacccgtacctcaagtacaaccacgccgacgccgagttccaggagcggctcaaagaagatacgtcttttgggggcaacctcgggcgagcagtcttccaggccaaaaagaggcttcttgaacctcttggtctggttgaggaagcggctaagacggctcctggaaagaagaggcctgtagagcagtctcctcaggaaccggactcctccgcgggtattggcaaatcgggtgcacagcccgctaaaaagagactcaatttcggtcagactggcgacacagagtcagtcccagaccctcaaccaatcggagaacctcccgcagccccctcaggtgtgggatctcttacaatggcttcaggtggtggcgcaccagtggcagacaataacgaaggtgccgatggagtgggtagttcctcgggaaattggcattgcgattcccaatggctgggggacagagtcatcaccaccagcacccgaacctgggccctgcccacctacaacaatcacctctacaagcaaatctccaacagcacatctggaggatcttcaaatgacaacgcctacttcggctacagcaccccctggaggtattttgacttcaacagattccactgccacttctcaccacgtgactggcagcgactcatcaacaactggggattccggcctaagcgactcaacttcaagctcttcaacattcaggtcaaagaggttacggacaacaatggagtcaagaccatcgccaataaccttaccagcacggtccaggccttcacggactcagactatcagctcccgtacgtgctcgggtcggctcacgagggctgcctcccgccgttcccagcggacgttttcatgattcctcagtacgggtatctgacgcttaatgatggaagccaggccgtgggtcgttcgtccttttactgcctggaatatttcccgtcgcaaatgctaagaacgggtaacaacttccagttcagctacgagtttgagaacgtacctttccatagcagctacgctcacagccaaagcctggaccgactaatgaatccactcatcgaccaatacttgtactatctctcaaagactattaacggttctggacagaatcaacaaacgctaaaattcagtgtggccggacccagcaacatggctgtccagggaagaaactacatacctggacccagctaccgacaacaacgtgtctcaaccactgtgactcaaaacaacaacagcgaatttgcttggcctggagcttcttcttgggctctcaatggacgtaatagcttgatgaatcctggacctgctatggccagccacaaagaaggagaggaccgtttctttcctttgtctggatctttaatttttggcaaacaaggaactggaagagacaacgtggatgcggacaaagtcatgataaccaacgaagaagaaattaaaactactaacccggtagcaacggagtcctatggacaagtggccacaaaccaccagagtgcccaagcacaggcgcagaccggctgggttcaaaaccaaggaatacttccgggtatggtttggcaggacagagatgtgtacctgcaaggacccatttgggccaaaattcctcacacggacggcaactttcacccttctccgctgatgggagggtttggaatgaagcacccgcctcctcagatcctcatcaaaaacacacctgtacctgcggatcctccaacggccttcaacaaggacgagctgaactctttcatcacccagtattctactggccaagtcagcgtggagatcgagtgggagctgcagaaggaaaacagcaagcgctggaacccggagatccagtacacttccaactattacaagtctaataatgttgaatttgctgttaatactgaaggtgtatatagtgaaccccgccccattggcaccagatacctgactcgtaatctg

SEQ ID NO: 620 - DNA, 2205 bp, Artificial Sequence
  source: /note="Description of Artificial Sequence: Synthetic polynucleotide"
atggctgccgatggttatcttccagattggctcgaggacaaccttagtgaaggaattcgcgagtggtgggctttgaaacctggagcccctcaacccaaggcaaatcaacaacatcaagacaacgctcgaggtcttgtgcttccgggttacaaataccttggacccggcaacggactcgacaagggggagccggtcaacgcagcagacgcggcggccctcgagcacgacaaggcctacgaccagcagctcaaggccggagacaacccgtacctcaagtacaaccacgccgacgccgagttccaggagcggctcaaagaagatacgtcttttgggggcaacctcgggcgagcagtcttccaggacaaaaagaggcttcttgaacctcttggtctggttgaggaagcggctaagacggctcctggaaagaagaggcctgtagagcagtctcctcaggaaccggactcctccgcgggtattggcaaatcgggtgcacagcccgctaaaaagagactcaatttcggtcagactggcgacacagagtcagtcccagaccctcaaccaatcggagaacctcccgcagccccctcaggtgtgggatctcttacaatggcttcaggtggtggcgcaccagtggcagacaataacgaaggtgccgatggagtgggtagttcctcgggaaattggcattgcgattcccaatggctgggggacagagtcatcaccaccagcacccgaacctgggccctgcccacctacaacaatcacctctacaagcaaatctccaacagcacatctggaggatcttcaaatgacaacgcctacttcggctacagcaccccctgggggtattttgacttcaacagattccactgccacttctcaccacgtgactggcagcgactcatcaacaactggggattccggcctaagcgactcaacttcaagctcttcaacattcaggtcaaagaggttacggacaacaatggagtcaagaccatcgccaataaccttaccagcacggtccaggtcttcacggactcagactatcagctcccgtacgtgctcgggtcggctcacgagggctgcctcccgccgttcccagcggacgttttcatgattcctcagtacgggtatctgacgcttaatgatggaagccaggccgtgggtcgttcgtccttttactgcctggaatatttcccgtcgcaaatgctaagaacgggtaacaacttccaattcagctacgagtttgagaacgtacctttccatagcagctacgctcacagccaaagcctggaccgactaatgaatccactcatcgaccaatacttgtactatctctcaaagactattaacggttctggacagaatcaacaaacgctaaaattcagtgtggccggacccagcaacatggctgtccagggaagaaactacatacctggacccagctaccgacaacaacgtgtctcaaccactgtgactcaaaacaacaacagcgaatttgcttggcctggagcttcttcttgggctctcaatggacgtaatagcttgatgaatcctggacctgctatggccagccacaaagaaggagaggaccgtttctttcctttgtctggatctttaatttttggcaaacaaggaactggaagagacaacgtggatgcggacaaagtcatgataaccaacgaagaagaaattaaaactactaacccggtagcaacggagtcctatggacaagtggccacaaaccaccagagtgcccaagcacaggcgcagaccggctgggttcaaaaccaaggaatacttccgggtatggtttggcaggacagagatgtgtacctgcaaggacccatttgggccaaaattcctcacacggacggcaactttcacccttctccgctgatgggagggtttggaatgaagcacccgcctcctcagatcctcatcaaaaacacacctgtacctgcggatcctccaacggccttcaacaaggacaagctgaactctttcatcacccagtattctactggccaagtcagcgtggagatcgagtgggagctgcagaaggaaaacagcaagcgctggaacccggagatccagtacacttccaactattacaagtctaataatgttgaatttgctgttaatactgaaggtgtatatagtgaaccccgccccattggcaccagatacctgactcgtaatctg

SEQ ID NO: 621 - DNA, 2208 bp, Artificial Sequence
  source: /note="Description of Artificial Sequence: Synthetic polynucleotide"
atggctgccgatggttatcttccagattggctcgaggacaaccttagtgaaggaattcgcgagtggtgggctttgaaacctggagcccctcaacccaaggcaaatcaacaacatcaagacaacgctcgaggtcttgtgcttccgggttacaaataccttggacccggcaacggactcgacaagggggagccggtcaacgcagcagacgcggcggccctcgagcacgacaaggcctacgaccagcagctcaaggccggagacaacccgtacctcaagtacaaccacgccgacgccgagttccaggagcggctcaaagaagatacgtcttttgggggcaacctcgggcgagcagtcttccaggccaaaaagaggcttcttgaacctcttggtctggttgaggaagcggctaagacggctcctggaaagaagaggcctgtagagcagtctcctcaggaaccggactcctccgcgggtattggcaaatcgggtgcacagcccgctaaaaagagactcaatttcggtcagactggcgacacagagtcagtcccagaccctcaaccaatcggagaacctcccgcagccccctcaggtgtgggatctcttacaatggcttcaggtggtggcgcaccagtggcagacaataacgaaggtgccgatggagtgggtagttcctcgggaaattggcattgcgattcccaatggctgggggacagagccatcaccaccagcacccgaacctgggccctgcccacctacaacaatcacctctacaagcaaatctccaacagcacatctggaggatcttcaaatgacaacgcctacttcggctacagcaccccctgggggtattttgacttcaacagattccactgccacttctcaccacgtgactggcagcggctcatcaacaacaactggggattccggcctaagcgactcaacttcaagctcttcaacattcaggtcaaagaggttacggacaacaatggagtcaagaccatcgccaataaccttaccagcacggtccaggtcttcacggactcagactatcagctcccgtacgtgctcgggtcggctcacgagggctgcctcccgccgttcccagcggacgttttcatgattcctcagtacgggtatctgacgcttaatgatggaagccaggccgtgggtcgttcgtccttttactgcctggaatatttcccgtcgcaaatgctaagaacgggtaacaacttccagttcagctacgagtttgagaacgtacctttccatagcagctacgctcacagccaaagcctggaccgactaatgaatccactcatcgaccaatacttgtactatctctcaaagactattaacggttctggacagaatcaacaaacgctaaaattcagtgtggccggacccagcaacatggctgtccagggaagaaactacatacctggacccagctaccgacaacaacgtgtctcaaccactgtgactcaaaacaacaacagcgaatttgcttggcctggagcttcttcttgggctctcaatggacgtaatagcttgatgaatcctggacctgctatggccagccacaaagaaggagaggaccgtttctttcctttgtctggatctttaatttttggcaaacaaggaactggaagagacaacgtggatgcggacaaagtcatgacaaccaacgaagaagaaattaaaactactaacccggtagcaacggagtcctatggacaagtggccacaaaccaccagagtgcccaagcacaggcgcagaccggctgggttcaaaaccaaggaatacttccgggtatggtttggcaggacagagatgtgtacctgcaaggacccatttgggccaaaattcctcacacggacggcaactttcacccttctccgctgatgggagggtttggaatgaagcacccgcctcctcagatcctcatcaaaaacacacctgtacctgcggatcctccaacggccttcaacaaggacaagctgaactctttcatcacccagtattctactggccaagtcagcgtggagatcgagtgggagctgcagaaggaaaacagcaagcgctggaacccggagatccagtacacttccaactattacaagtctaataatgttgaatttgctgttaatactgaaggtgtatatagtgaaccccgccccattggcaccagatacctgactcgtaatctg

SEQ ID NO: 622 - DNA, 2208 bp, Artificial Sequence
  source: /note="Description of Artificial Sequence: Synthetic polynucleotide"
atggctgccgatggttatcttccagattggctcgaggacaaccttagtgaaggaattcgcgagtggtgggctttgaaacctggagcccctcaacccaaggcaaatcaacaacatcaagacaacgctcgaggtcttgtgcttccgggttacaaataccttggacccggcaacggactcgacaagggggagccggtcaatgcagcagacgcggcggccctcgagcacgacaaggcctacgaccagcagctcaaggccggagacaacccgtacctcaagtacaaccacgccgacgccgagttccaggagcggctcaaagaagatacgtcttttgggggcaacctcgggcgagcagtcttccagaccaaaaagaggcttcttgaacctcttggtctggttgaggaagcggctaagacggctcctggaaagaagaggcctgtagagcagtctcctcaggaaccgggctcctccgcgggtattggcaaatcgggtgcacagcccgctaaaaagagactcaatttcggtcagactggcgacacagagtcagtcccagaccctcaaccaatcggagaacctcccgcagccccctcaggtgtgggatctcttacaatggcttcaggtggtggcgcaccagtggcagacaataacgaaggtgccgatggagtgggtagttcctcgggaaattggcattgcgattcccaatggctgggggacagagtcatcaccaccagcacccgaacctgggccctgcccacctacaacaatcacctctacaagcaaatctccaacagcacatctggaggatcttcaaatgacaacgcctacttcggctacagcaccccctgggggtattttgacttcaacagattccactgccacttctcaccacgtgactggcagcgactcatcaacaacaactggggattccggcctaagcgactcaacttcaagctcttcaacattcaggtcaaagaggttacggacaacaatggagtcaagaccatcgccaataaccttaccagcacggtccaggtcttcacggactcagactatcagctcccgtacgtgctcgggtcggctcacgagggctgcctcccgccgttcccagcggacgttttcatgattcctcagtacgggtatctgacgcttaatgatggaagccaggccgtgggtcgttcgtccttttactgcctggaatatttcccgtcgcaaatgctaagaacgggtaacaacttccagttcagctacgagtttgagaacgtacctttccatagcagctacgctcacagccaaagcctggaccgactaatgaatccactcatcgaccaatacttgcactatctctcaaagactattaacggttctggacagaatcaacaaacgctaaaattcagtgtggccggacccagcaacatggctgtccagggaagaaactacatacctggacccagctaccgacaacaacgtgtctcaaccactgtgactcaaaacaacaacagcgaatttgcttggcctggagcttcttcttgggctctcaatggacgtaatagcttgatgaatcctggacctgctatggccagccacaaagaaggagaggaccgtttctttcctttgtctggatctttaatttttggcaaacaaggaactggaagagacaacgtggatgcggacaaagtcatgataaccaacgaagaagaaattaaaactactaacccggtagcaacggagtcctatggacaagtggccacaaaccaccagagtgcccaagcacaggcgcagaccggctgggttcaaaaccaaggaatacttccgggtatggtttggcaggacagagatgtgtacctgcaaggacccatttgggccaaaattcctcacacggacggcaactttcacccttctccgctgatgggagggtttggaatgaagcacccgcctcctcagatcctcatcaaaaacacacctgtacctgcggatcctccaacggccttcaacaaggacaagctgaactctttcatcacccagtattctactggccaagtcagcgtggagatcgagtgggagctgcagaaggaaaacagcaagcgctggaacccggagatccagtacacttccaactattacaagtctaataatgttgaatttgctgttaatactgaaggtgtatatagtgaaccccgccccattggcaccagatacctgactcgtaatctg

SEQ ID NO: 623 - DNA, 2208 bp, Artificial Sequence
  source: /note="Description of Artificial Sequence: Synthetic polynucleotide"
atggctgccgatggttattttccagattggctcgaggacaaccttagtgaaggaattcgcgagtggtgggctttgaaacctggagcccctcaacccaaggcaaatcaacaacatcaagacaacgctcgaggtcttgtgcttccgggttacaaataccttggacccggcaacggactcgacaagggggagccggtcaacgcagcagacgcggcggccctcgagcacgacaaggcctacgaccagcagctcaaggccggagacaacccgtacctcaagtacaaccacgccgacgccgagttccaggagcggctcaaagaagatacgtcttttgggggcaacctcgggcgagcagtcttccaggccaaaaagaggcttcttgaacctcttggtctggttgaggaagcggctaagacggctcctggaaagaagaggcctgtagagcagtctcctcaggaaccggactcctccgcgggtattggcaaatcgggtgcacagcccgctaaaaagagactcaatttcggtcagactggcgacacagagtcagtcccagaccctcaaccaatcggagaatctcccgcagccccctcaggtgtgggatctcttacaatggcttcaggtggtggcgcaccagtggcagacaataacgaaggtgccgatggagtgggtagttcctcgggaaattggcattgcgattcccaatggctgggggacagagtcatcaccaccagcacccgaacctgggccctgcccacctacaacaatcacctctacaagcaaatctccaacagcacatctggaggatcttcaaatgacaacgcctacttcggctacagcaccccctgggggtattttgacttcaacagattccactgccacttctcaccacgtgactggcagcgactcatcaacaacaactggggattccggcctaagcgactcaacttcaagctcttcaacattcaggtcaaagaggttacggacaacaatggagtcaagaccatcgccaataaccttaccagcacggtccaggtcttcacggactcagactatcagctcccgtacgtgctcgggtcggctcacgagggctgcctcccgccgttcccagcggacgttttcatgattcctcagtacgggtatctgacgcttaatgatggaagccaggccgtgggtcgttcgtccttttactgcctggaatatctcccgtcgcaaatgctaagaacgggtaacaacttccagttcagctacgagtttgagaacgtacctttccatagcagctacgctcacagccaaagcctggaccgactaatgaatccactcatcgaccaatacttgcactatctctcaaagactattaacggttctggacagaatcaacaaacgctaaaattcagtgtggccggacccagcaacatggctgtccagggaagaaactacatacctggacccagctaccgacaacaacgtgtctcaaccactgtgactcaaaacaacaacagcgaatttgcttggcctggagcttcttcttgggctctcaatggacgtaatagcttgatgaatcctggacctgctgtggccagccacaaagaaggagaggaccgtttctttcctttgtctggatctttaatttttggcaaacaaggaactggaagagacaacgtggatgcggacaaagtcatgataaccaacgaagaagaaattaaaactactaacccggtagcaacggagtcctatggacaagtggccacaaaccaccagagtgcccaagcacaggcgcagaccggctgggttcaaaaccaaggaatacttccgggtatggtttggcaggacagagatgtgtacctgcaaggacccatttgggccaaaattcctcacacggacggcaactttcacccttctccgctgatgggagggtttggaatgaagcacccgcctcctcagatcctcatcaaaaacacacctgtacctgcggatcctccaacggccttcaacaaggacaagctgaactctttcatcacccagtattctactggccaagtcagcgtggagatcgagtgggagctgcagaaggaaaacagcaagcgctggaacccggagatccagtacacttccaactattacaagtctaataatgttgaatttgctgttaatactgaaggtgtatatagtgaaccccgccccattggcaccagatacctgactcgtaatctg

SEQ ID NO: 624 - DNA, 2208 bp, Artificial Sequence
  source: /note="Description of Artificial Sequence: Synthetic polynucleotide"
atggctgccgatggttatcttccagattggctcgaggacaaccttagtgaaggaattcgcgagtggtgggctttgaaacctggagcccctcaacccaaggcaaatcaacaacatcaagacaacgctcgaggtcttgtgcttccgggttacaaataccttggacccggcaacggactcgacaagggggagccggtcaacgcagcagacgcggcggccctcgagcacgacaaggcctacgaccagcagctcaaggccggagacaacccgtacctcaagtacaaccacgccgacgccgagttccaggagcggctcaaagaagatacgtcttttgggggcaacctcgggcgagcagtcttccaggccaaaaagaggcttcttgaacctcttggtccggttgaggaagcggctaagacggctcctggaaagaagaggcctgtagagcagtctcctcaggaaccggactcctccgcgggtattggcaaatcgggtgcacagcccgctaaaaagagactcaatttcggtcagactggcgacacagagtcagtcccagaccctcaaccaatcggagaacctcccgcagccccctcaggtgtgggatctcttacaatggcttcaggtggtggcgcaccagtggcagacaataacgaaggtgccgatggagtgggtagttcctcgggaaattggcattgcgattcccaatggctgggggacagagtcatcaccaccagcacccgaacctgggccctgcccacctacaacaatcacctctacaagcaaatctccaacagcacatctggaggatcttcaaatgacaacgcctacttcggctacagcaccccctgggggtattttgacttcaacagattccactgccacttctcaccacgtgactggcagcgactcatcaacaacaactggggattccggcctaagcgactcaacttcaagctcttcaacattcaggtcaaagaggttacggacaacaatggagtcaagaccatcgccaataaccttaccagcacggtccaggtcttcacggactcagactatcagctcccgtacgtgctcgggtcggctcacgagggctgcctcccgccgttcccagcggacgttttcatgattcctcagtacgggtatctgacgcttaatgatggaagccaggccgtgggtcgttcgtccttttactgcctggaatatttcccgtcgcaaatgctaagaacgggtaacaacttccagttcagctacgagtttgagaacgtacctttccatagcagctacgctcacagccaaagcctggaccgactaatgaatccactcatcgaccaatacttgtactatctctcaaagactattaacggttctggacagaatcaacaaacgctaaaattcagtgtggccggacccagcaacatggctgtccagggaagaaactacatacctggacccagctaccgacaacaacgtgtctcaaccactgtgactcaaaacaacaacagcgaatttgcttggcctggagcttcttcttgggctctcaatggacgtaatagcttgatgaatcctggacctgctatggccagccacaaagaaggagaggaccgtttctttcctttgtctggatctttaatttttggcaaacaaggaactggaagagacaacgtggatgcggacaaagtcatgataaccaacgaagaagaaattaaaactactaacccggtagcaacggagtcctatggacaagcggccacaaaccaccagagtgcccaagcacaggcgcagaccggctgggttcaaaaccaaggaatacttccgggtatggtttggcaggacagagatgtgtacctgcaaggacccatttgggccaaaattcctcacacggacggcaactttcacccttctccgctgatgggagggtttggaatgaagcacccgcctcctcagatcctcatcaaaaacacacctgtacctgcggatcctccaacggccttcaacaaggacaagctgaactctttcatcacccagtattctactggccaagtcagcgtggagatcgagtgggagctgcagaaggaaaacagcaagcgctggaacccggagatccagtacacttccaactattacaagtctaataatgttgaatttgctgttaatactgaaggtgtatatagtgaaccccgccccattggcaccagatacctgactcgtaatctg

SEQ ID NO: 625 - DNA, 2208 bp, Artificial Sequence
  source: /note="Description of Artificial Sequence: Synthetic polynucleotide"
atggctgccgatggttatcttccagattggctcgaggacaaccttagtgaaggaattcgcgagtggtgggctttgaaacctggagcccctcaacccaaggcaaatcaacaacatcaagacaacgctcggggtcttgtgcttccgggttacaaataccttggacccggcaacggactcgacaagggggagccggtcaacgcagcagacgcggcggccctcgagcacgacaaggcctacgaccagcagctcaaggccggagacaacccgtacctcaagtacaaccacgccgacgccgagttccaggagcggctcaaagaagatacgtcttttgggggcaacctcgggcgagcagtcttccaggccaaaaagaggcttcttgaacctcttggtccggttgaggaagcggctaagacggctcctggaaagaagaggcctgtagagcagtctcctcaggaaccggactcctccgcgggtattggcaaatcgggtgcacagcccgctaaaaagagactcaatttcggtcagactggcgacacagagtcagtcccagaccctcaaccaatcggagaacctcccgcagccccctcaggtgtgggatctcttacaatggcttcaggtggtggcgcaccagtggcagacaataacgaaggtgccgatggagtgggtagttcctcgggaaattggcattgcgattcccaatggctgggggacagagtcatcaccaccagcacccgaacctgggccctgcccacctacaacaatcacctctacaagcaaatctccaacagcacatctggaggatcttcaaatgacaacgcctacttcggctacagcaccccctgggggtattttgacttcaacagattccactgccacttctcaccacgtgactggcggcgactcatcaacaacaactggggattccggcctaagcgactcaacttcaagctcttcaacattcaggtcaaagaggttacggacaacaatggagtcaagaccatcgccaataaccttaccagcacggtccaggtcttcacggactcagactatcagctcccgtacgtgctcgggtcggctcacgagggctgcctcccgccgttcccagcggacgttttcatgattcctcagtacgggtatctgacgcttaatgatggaagccaggccgtgggtcgttcgtccttttactgcctggaatatttcccgtcgcaaatgctaagaacgggtaacaacttccagttcagctacgagtttgagaacgtacctttccatagcagctacgctcacagccaaagcctggaccgactaatgaatccactcatcgaccaatacttgtactatctctcaaagactattaacggttctggacagaatcaacaaacgctaaaattcagtgtggccggacccagcaacatggctgtccagggaagaaactacatacctggacccagctaccgacaacaacgtgtctcaaccactgtgactcaaaacaacaacagcgaatttgcttggcctggagcttcttcttgggctctcaatggacgtaatagcttgatgaatcctggacctgctatggccagccacaaagaaggagaggaccgtttctttcctttgtctggatctttaatttttggcaaacaaggaactggaagagacaacgtggatgcggacaaagtcatgataaccaacgaagaagaaattaaaactactaacccggtagcaacggagtcctatggacaagtggccacaaaccaccagagtgcccaagcacaggcgcagaccggctgggttcaaaaccaaggaatacttccgggtatggtttggcaggacagagatgtgtacctgcaaggacccatttgggccaaaattcctcacacggacggcaactttcacccttctccgctgatgggagggtttggaatgaagcacccgcctcctcagatcctcatcaaaaacacacctgtacctgcggatcctccaacggccttcaacaaggacaagctgaactctttcatcacccagtattctactggccaagtcagcgtggagatcgagtgggagctgcagaaggaaaacagcaagcgctggaacccggagatccagtacacttccaactattacaagtctaataatgttgaatttgctgttaatactgaaggtgtatatagtgaaccccgccccattggcaccagatacctgactcgtaatctg

SEQ ID NO: 626 - DNA, 2208 bp, Artificial Sequence
  source: /note="Description of Artificial Sequence: Synthetic polynucleotide"
atggctgccgatggttatcttccagattggctcgaggacaaccttagtgaaggaattcgcgagtggtgggctttgaaacctggagcccctcaacccaaggcaaatcaacaacatcaagacaacgctcgaggtcttgtgcttccgggttacaaataccttggacccggcaacggactcgacaagggggagccggtcaacgcagcagacgcggcggccctcgagcacgacaaggcctacgaccagcagctcaaggccggagacaacctgtacctcaagtacaaccacgccgacgccgagttccaggagcggctcaaagaagatacgtcttttgggggcaacctcgggcgagcagtcttccaggccaaaaagaggcttcttgaacctcttggtctggttgaggaagcggctaagacggctcctggaaagaagaggcctgtagagcagtctcctcaggaaccggactcctccgcgggtattggcaaatcgggtgcacagcccgctaaaaagagactcaatttcggtcagactggcgacacagagtcagtcccagaccctcaaccaatcggagaacctcccgcagccccctcaggtgtgggatctcttacaatggcttcaggtggtggcgcaccagtggcagacaataacgaaggtgccgatggagtgggtagttcctcgggaaattggcattgcgattcccaatggctgggggacagagtcatcaccaccagcacccgaacctgggccctgcccacctacaacaatcacctctacaagcaaatctccaacagcacatctggaggatcttcaaatgacaacgcctacttcggctacagcaccccctgggggtattttgacttcaacagattccactgccacttctcaccacgtgactggcagcgactcatcaacaacaactggggattccggcctaagcgactcaacttcaagctcttcaacattcaggtcaaagaggttacggacaacaatggagtcaagaccatcgccaataaccttaccagcacggtccaggtcttcacggactcagactatcagctcccgtacgtgctcgggtcggctcacgagggctgcctcccgccgttcccagcggacgttttcatgattcctcagtacgggtatctgacgcttaatgatggaagccaggccgtgggtcgttcgtccttttactgcctggaatatttcccgtcgcaaatgctaagaacgggtaacaacttccagttcagctacgagtttgagaacgtacctttccatagcagctacgctcacagccaaagcctggaccgactaatgaatccactcatcgaccaatacttgcactatctctcaaagactattaacggttctggacagaatcaacaaacgctaaaattcagtgtggccggacccagcaacatggctgtccagggaagaaactacatacctggacccagctaccgacaacaacgtgtctcaaccactgtgactcaaaacaacaacagcgaatttgcttggcctggagcttcttcttgggctctcaatggacgtaatagcttgatgaatcctggacctgctatggccagccacaaagaaggagaggaccgtttctttcctttgtctggatctttaatttttggcaaacaaggaactggaagagacaacgtggatgcggacaaagtcatgataaccaacgaagaagaaattaaaactactaacccggtagcaacggagtcctatggacaagtggccacaaaccaccagagtgcccaagcacaggcgcagaccggctgggttcaaaaccaaggaatacttccgggtatggtttggcaggacagagatgtgtacctgcaaggacccatttgggccaaaattcctcacacggacggcaactttcacccttctccgctgatgggagggtttggaatgaagcacccgcctcctcagatcctcatcaaaaacacacctgtacctgcggatcctccaacggccttcaacaaggacaagctgaactctttcatcacccagtattctactggccaagtcagcgtggagatcgagtgggagctgcagaaggaaaacagcaagcgctggaacccggagatccagtacacttccaactattacaagtctaataatgttgaatttgctgttaatactgaaggtgtatatagtgaaccccgccccattggcaccagatacctgactcgtaatctg

SEQ ID NO: 627 - DNA, 2208 bp, Artificial Sequence
  source: /note="Description of Artificial Sequence: Synthetic polynucleotide"
atggctgccgatggttatcttccagattggctcgaggacaaccttagtgaaggaattcgcgagtggtgggctttgaaacctggagcccctcaacccaaggcaaatcaacaacatcaagacaacgctcgaggtcttgtgcttccgggttacaaataccttggacccggcaacggactcgacaagggggagccggtcaacgcagcagacgcggcggccctcgagcacgacaaggcctacgaccagcagctcaaggccggagacaacccgtacctcaagtacaaccacgccgacgccgagttccaggagcggctcaaagaagatacgtcttttgggggcaacctcgggcgagcagtcttccaggccaaaaagaggcttcttgaacctcttggtctggttgaggaagcggctaagacggctcctggaaagaagaggcctgtagagcagtctcctcaagaaccggactcctccgcgggtattggcaaatcgggtgcacagcccgctaaaaagagactcaatttcggtcagactggcgacacagagtcagtcccagaccctcaaccaatcggagaacctcccgcagccccctcaggtgtgggatctcttacaatggcttcaggtggtggcgcaccagtggcagacaataacgaaggtgccgatggagtgggtagttcctcgggaaattggcattgcgattcccaatggctgggggacagagtcatcaccaccagcacccgaacctgggccctgcccacctacaacaatcacctctacaagcaaatctccaacagcacatctggaggatcttcaaatgacaacgcctacttcggctacagcaccccctgggggtattttgacttcaacagattccactgccacttctcaccacgtgactggcagcgactcatcaacaacaactggggattccggcctaagcgactcaacttcaagctcttcaacattcaggtcaaagaggttacggacaacaatggagtcaagaccatcgccaataaccttaccagcacggtccaggtcttcacggactcagactatcagctcccgtacgtgctcgggtcggctcacgagggctgcctcccgccgttcccagcggacgttttcatgattcctcagtacgggtatctgacgcttaatgatggaagccaggccgtgggtcgttcgtccttttactgcctggaatatttcccgtcgcaaatgctaagaacgggtaacaacttccagttcagctacgagtttgagaacgtacctttccatagcagctacgctcacagccaaagcctggaccgactaatgaatccactcatcgaccaatacttgcactatctctcaaagactattaacggttctggacagaatcaacaaacgctaaaattcagtgtggccggacccagcaacatggctgtccagggaagaaactacatacctggacccagctaccgacaacaacgtgtctcaaccactgtgactcaaaacaacaacagcgaatttgcttggcctggagcttcttcttgggctctcaatggacgtaatagcttgatgaatcctggacctgctatggccagccacaaagaaggagaggaccgtttctttcctttgtctggatctttaatttttggcaaacaaggaactggaagagacaacgtggatgcggacaaagtcatgataaccaacgaagaagaaattaaaactactaacccggtagcaacggagtcctatggacaagtggccacaaaccaccagagtgcccaagcacaggcgcagaccggctgggttcaaaaccaaggaatacttccgggtatggtttggcaggacagagatgtgtacctgcaaggacccatttgggccaaaattcctcacacggacggcaactttcacccttctccgctgatgggagggtttggaatgaagcacccgcctcctcagatcctcatcaaaaacacacctgtacctgcggatcctccaacggccttcaacaaggacaagctgaactctttcatcacccagtattctactggccaagtcagcgtggagatcgagtgggagctgcagaaggaaaacagcaagcgctggaacccggagatccagtacacttccaactattacaagtctaataatgttgaatttgctgttaatactgaaggtgtatatagtgaaccccgccccattggcaccagatacctgactcgtaatctg

SEQ ID NO: 628 - DNA, 2208 bp, Artificial Sequence
  source: /note="Description of Artificial Sequence: Synthetic polynucleotide"
  modified_base (1325)..(1325): a, c, t, or g
atggctgccgatggttatcttccagattggctcgaggacaaccttagtgaaggaattcgcgagtggtgggctttgaaacctggagcccctcaacccaaggcaaatcaacaacatcaagacaacgctcgaggtcttgtgcttccgggttacaaataccttggacccggcaacggactcgacaagggggagccggtcaacgcagcagacgcggcggccctcgagcacgacaaggcctacgaccagcagctcaaggccggagacaacccgtacctcaagtacaaccacgccgacgccgagttccaggagcggctcaaagaagatacgtcttttgggggcaacctcgggcgagcagtcttccaggccaaaaagaggcttcttgaacctcttggtctggttgaggaagcggctaagacggctcctggaaagaagaggcctgtagagcagtctcctcaggaaccggactcctccgcgggtattggcaaatcgggtgcacagcccgctaaaaagagactcaatttcggtcagactggcgacacagagtcagtcccagaccctcaaccaatcggagaacctcccgcagccccctcaggtgtgggatctcttacaatggcttcaggtggtggcgcaccagtggcagacaataacgaaggtgccgatggagtgggtagttcctcgggaaattggcattgcgattcccaatggctgggggacagagtcatcaccaccagcacccgaacctgggccctgcccacctacaacaatcacctctacaagcaaatctccaccagcacatctggaggatcttcaaatgacaacgcctacttcggctacagcaccccctgggggtattttgacttcaacagattccactgccacttctcaccacgtgactggcagcgactcatcaacaacaactggggattccggcctaagcgactcaacttcaagctcttcaacattcaggtcaaagaggttacggacaacaatggagtcaagaccatcgccaataaccttaccagcacggtccaggtcttcacggactcagactatcagctcccgtacgtgctcgggtcggctcacgagggctgcctcccgccgttcccagcggacgttttcatgattcctcagtacgggtatctgacgcttaatgatggaagccaggccgtgggtcgttcgtccttttactgcctggaatatttcccgtcgcaaatgctaagaacgggtaacaacttccagttcagctacgagtttgagaacgtacctttccatagcagctacgctcacagccaaagcctggaccgactaatgaatccactcatcgaccnatacttgcactatctctcaaagactattaacggttctggacagaatcaacaaacgctaaaattcagtgtggccggacccagcaacatggctgtccagggaagaaactacatacctggacccagctaccgacaacaacgtgtctcaaccactgtgactcaaaacaacaacagcgaatttgcttggcctggagcttcttcttgggctctcaatggacgtaatagcttgatgaatcctggacctgctatggccagccacaaagaaggagaggaccgtttctttcctttgtctggatctttaatttttggcaaacaaggaactggaagagacaacgtggatgcggacaaagtcatgataaccaacgaagaagaaattaaaactactaacccggtagcaacggagtcctatggacaagtggccacaaaccaccagagtgcccaagcacaggcgcagaccggctgggttcaaaaccaaggaatacttccggatatggtttggcaggacagagatgtgtacctgcaaggacccatttgggccaaaattcctcacacggacggcaactttcacccttctccgctgatgggagggtttggaatgaagcacccgcctcctcagatcctcatcaaaaacacacctgtacctgcggatcctccaacggccttcaacaaggacaagctgaactctttcatcacccagtattctactggccaagtcagcgtggagatcgagtgggagctgcagaaggaaaacagcaagcgctggaacccggagatccagtacacttccaactattacaagtctaataatgttgaatttgctgttaatactgaaggtgtatatagtgaaccccgccccattggcaccagatacctgactcgtaatctg

SEQ ID NO: 629 - DNA, 2208 bp, Artificial Sequence
  source: /note="Description of Artificial Sequence: Synthetic polynucleotide"
atggctgccgatggttatcttccagattggctcgaggacaaccttagtgaaggaattcgcgagtggtgggctttgaaacctggagcccctcaacccaaggcaaatcaacaacatcaagacaacgctcgaggtcttgtgcttccgggttacaaataccttggacccggcaacggactcgacaagggggagccggtcaacgcagcagacgcggcggccctcgagcacgacaaggcctacgaccagcagctcaaggccggagacaacccgtacctcaagtacaaccacgccgacgccgagttccaggagcggctcaaagaagatacgtcttttgggggcaacctcgggcgagcagtcttccaggccaaaaagaggcttcttgaacctcttggtctggttgaggaagcggctaagacggctcctggaaagaagaggcctgtagagcagtctcctcaggaaccggactcctccgcgggtattggcaaatcgggtgcacagcccgctaaaaagagactcaatttcggtcagactggcgacacagagtcagtcccagaccctcaaccaatcggagaacctcccgcagccccctcaggtgtgggatctcttacaatggcttcaggtggtggcgcaccagtggcagacaataacgaaggtgccgatggagtgggtagttcctcgggaaattggcattgcgattcccaatggctgggggacagagtcatcaccaccagcacccgaacctgggccctgcccacctacaacaatcacctctacaagcaaatctccaacagcacatctggaggatcttcaaatgacaacgcctacttcggctacagcaccccctgggggtattttgacttcaacagattccactgccacttctcaccacgtgactggcagcgactcatcaacaacaactggggattccggcctaagcgactcaacttcaagctcttcaacattcaggtcaaagaggttacggacaacaatggagtcaagaccatcgccaataaccttaccagcacggtccaggtcttcacggactcagactatcagctcccgtacgtgctcgggtcggctcacgagggctgcctcccgccgttcccagcggacgttttcatgattcctcagtacgggtatctgacgcttaatgatggaagccaggccgtgggtcgttcgtccttttactgcctggaatatttcccgtcgcaaatgctaagaacgggtaacaacttccagttcagctacgagtttgagaacgtacctttccatagcagctacgctcacagccaaagcctggaccgactaatgaatccactcatcgaccaatacttgcactatctctcaaagactattaacggttctggacagaatcaacaaacgctaaaattcagtgtggccggacccagcaacatggctgtccagggaagaaactacatacctggacccagctaccgacaacaacgtgtctcaaccactgtgactcaaaacaacaacagcgaatttgcttggcctggagcttcttcttgggctctcaatggacgtaatagcttgatgaatcctggacctgctatggccagctacaaagaaggagaggacagtttctttcctttgtctggatctttaatttttggcaaacaaggaactggaagagacaacgtggatgcggacaaagtcatgataaccaacgaagaagaaattaaaactactaacccggtagcaacggagtcctatggacaagtggccacaaaccaccagagtgcccaagcacaggcgcagaccggctgggttcaaaaccaaggaatacttccgggtatggtttggcaggacagagatgtgtacctgcaaggacccatttgggccaaaattcctcacacggacggcaactttcacccttctccgctgatgggagggtttggaatgaagcacccgcctcctcagaccctcatcaaaaacacacctgtacctgcggatcctccaacggccttcaacaaggacaagctgaactctttcatcacccagtattctactggccaagtcagcgtggagatcgagtgggagctgcagaaggaaaacagcaagcgctggaacccggagatccagtacacttccaactattacaagtctaataatgttgaatttgctgttaatactgaaggtgtatatagtgaaccccgccccattggcaccagatacctgactcgtaatctg

SEQ ID NO: 630 - DNA, 2208 bp, Artificial Sequence; identical to SEQ ID NO: 613
  source: /note="Description of Artificial Sequence: Synthetic polynucleotide"

SEQ ID NO: 631 - DNA, 2208 bp, Artificial Sequence
  source: /note="Description of Artificial Sequence: Synthetic polynucleotide"
atggctgccgatggttatcttccagattggctcgaggacaaccttagtgaaggaattcgcgagtggtgggctttgaaacctggagcccctcaacccagggcaaatcaacaacatcaagacaacgctcgaggtcttgtgcttccgggttacaaataccttggacccggcaacggactcgacaagggggagccggtcaacgcagccgacgcggcggccctcgagcacgacaaggcctacgaccagcagctcaaggccggagacaacccgtacctcaagtacaaccacgccgacgccgagttccaggagcggctcaaagaagatacgtcttttgggggcaacctcgggcgagcagtcttccaggccaaaaagaggcttcttgaacctcttggtctggttgaggaagcggctaagacggctcctggaaagaagaggcctgtagagcagtctcctcaggaaccggactcctccgcgggtattggcaaatcgggtgcacagcccgctaaaaagagactcaatttcggtcagactggcgacacagagtcagtcccagaccctcaaccaatcggagaacctcccgcagccccctcaggtgtgggatctcttacaatggcttcaggtggtggcgcaccagtggcagacaataacgaaggtgccgatggagtgggtagttcctcgggaaattggcattgcgattcccaatggctgggggacagagtcatcaccaccagcacccgaacctgggccctgcccacctacaacaatcacctctacaagcaaatctccaacagcacatctggaggatcttcaaatgacaacgcctacttcggctacagcaccccctgggggtattttgacttcaacagattccactgccacttctcaccacgtgactggcagcgactcatcaacaacaactggggattccggcctaagcgactcaacttcaagctcttcaacattcaggtcaaagaggttacggacaacaatggagtcaagaccatcgccaataaccttaccagcacggtccaggtcttcacggactcagactgtcagctcccgtacgtgctcgggtcggctcacgagggctgcctcccgccgttcccagcggacgttttcatgattcctcagtacgggtatctgacgcttaatgatggaagccaggccgtgggtcgttcgtccttttactgcctggaatatttcccgtcgcaaatgctaagaacgggtaacaacttccagttcagctacgagtttgagaacgtacctttccatagcagctacgctcacagccaaagcctggaccgactaacgaatccactcatcgaccaatacttgtactatctctcaaagactattaacggttctggacagaatcaacaaacgctaaaattcagtgtggccggacccagcaacatggctgtccagggaagaaactacatacctggacccagctaccgacaacaacgtgtctcaaccactgtgactcaaaacaacaacagcgaatttgcttggcctggagcttcttcttgggctctcaatggacgtaatagcttgatgaatcctggacctgctatggccagccacaaagaaggagaggaccgtttctttcctttgtctggatctttaatttttggcaaacaaggaactggaagagacaacgtggatgcggacaaagtcatgataaccaacgaagaagaaattaaaactactaacccggtagcaacggagtcccatggacaagtggccacaaaccaccagagtgcccaagcacaggcgcagaccggctgggttcaaaaccaaggaatacttccgggtatggtttggcaggacagagatgtgtacctgcaaggacccatttgggccaaaattcctcacacggacggcaactttcacccttctccgctgatgggagggtttggaatgaagcacccgcctcctcagatcctcatcaaaaacacacctgtacctgcggatcctccaacggccttcaacaaggacaagctgaactctttcatcacccagtattctactggccaagtcagcgtggagatcgagtgggagctgcagaaggaaaacagcaagcgctggaacccggagatccagtacacttccaactattacaagtctaataatgttgaatttgctgttaatactgaaggtgtatatagtgaaccccgccccattggcaccagatacctgactcgtaatctg

SEQ ID NO: 632 - DNA, 2208 bp, Artificial Sequence
  source: /note="Description of Artificial Sequence: Synthetic polynucleotide"
atggctgccgatggttatcttccagattggctcgaggacaaccttagtgaaggaattcgcgagtggtgggctttgaaacctggagcccctcaacccaaggcaaatcaacaacatcaagacaacgctcgaggtcttgtgcttccgggttacaaataccttggacccggcaacggactcgacaagggggagccggtcaacgcagcagacgcggcggccctcgagcacgacaaggcctacgaccagcagctcaaggccggagacaacccgtacctcaagtacaaccacgccgacgccgagttccaggagcggctcaaagaagatacgtcttttgggggcaacctcgggcgagcagtcttccaggccaaaaagaggcttcttgaacctcttggtctggttgaggaagcggctaagacggctcctggaaagaagaggcctgtagagcagtctcctcaggaaccggactcctccgcgggtattggcaaatcgggtgcacagcccgctaagaagagactcaatttcggtcagactggcgacacagagtcagtcccagaccctcaaccaatcggagaacctcccgcagccccctcaggtgtgggatctcttacaatggcttcaggtggtggcgcaccagtggcagacaataacgaaggtgccgatggagtgggtagttcctcgggaaattggcattgcgattcccaatggctgggggacagagtcatcaccaccagcacccgaacctgggccctgcccacctacaacaatcacctctacaagcaaatctccaacagcacatctggaggatcttcaaatgacaacgcctacttcggctacagcaccccctgggggtattttgacttcaacagattccactgccacttctcaccacgtgactggcagcgactcatcaacaacaactggggattccggcctaagcgactcaacttcaagctcttcaacattcaggtcaaagaggttacggacaacaatggagtcaagaccatcgccaataaccttaccagcacggtccaggtcttcacggactcagactatcagctcccgtacgtgctcgggtcggctcacgagggctgcctcccgccgttcccagcggacgttttcatgattcctcagtacgggtatctgacgcttaatgatggaagccaggccgtgggtcgttcgtccttttactgcctggaatatttcccgtcgcaaatgctaagaacgggtaacaacttccagttcagctacgagtttgagaacgtacctttccatagcagctacgctcacagccaaagcctggaccgactaatgaatccacccatcgaccaatacttgtactatctctcaaagactattaacggttctggacagaatcaacaaacgctaaaattcagtgtggccggacccagcaacatggctgtccagggaagaaactacatacctggacccagctaccgacaacaacgtgtctcaaccactgtgactcaaaacaacaacagcgaatttgcttggcctggagcttcttcttgggctctcaatggacgtaatagcttgatgaatcctggacctgctatggccagccacaaagaaggagaggaccgtttctttcctttgtctggatctttaatttttggcaaacaaggaactggaagagacaacgtggatgcggacaaagtcatgataaccaacgaagaagaaattaaaactactaacccggtagcaacggagtcctatggacaagtggccacaaaccaccagagtgcccaagcacaggcgcagaccggctgggttcaaaaccaaggaatacttccgggtatggtttggcaggacagagatgtgtacctgcaaggacccatttgggccaaaattcctcacacggacggcaactttcacccttctccgctgatgggagggtttggaatgaagcacccgcctcctcagatcctcatcaaaaacacacctgtacctgcggatcctccaacggccttcaacaaggacaagctgaactctttcatcacccagtattctactggccaagtcagcgtggagatcgagtgggagctgcagaaggaaaacagcaagcgctggaacccggagatccagtacacttccaactattacaagtctaataatgttgaatttgctgttaatactgaaggtgtatatggtgaaccccgccccattggcaccagatacctgactcgtaatctg

SEQ ID NO: 633 - DNA, 2208 bp, Artificial Sequence
  source: /note="Description of Artificial Sequence: Synthetic polynucleotide"
atggctgccgatggttatcttccagattggctcgaggacaaccttagtgaaggaattcgcgagtggtgggctttgaaacctggagcccctcaacccaaggcaaatcaacaacatcaagacaacgctcgaggtcttgtgcttccgggttacaaataccttggacccggcaacggactcgacaagggggagccggtcaacgcagcagacgcggcggccctcgagcacgacaaggcctacgaccagcagctcaaggccggagacaacccgtacctcaagtacaaccacgccgacgccgagttccaggagcggctcaaagaagatacgtcttttgggggcaacctcgggcgagcagtcttccaggccaaaaagaggcttcttgaacctcttggtctggttgaggaagcggctaagacggctcctggaaagaagaggcctgtagagcagtctcctcaggaaccggactcctccgcgggtattggcaaatcgggtgcacagcccgctaaaaagagactcaatttcggtcagactggcgacacagagtcagtcccagaccctcaaccaatcggagaacctcccgcagccccctcaggtgtgggatctcttacaatggcttcaggtggtggcgcaccagtggcagacaataacgaaggtgccgatggagtgggtagttcctcgggaaattggcattgcgattcccaatggctgggggacagagtcatcaccaccagcacccgaacctgggccctgcccacctacaacaatcacctctacaagcaaatctccaacagcacatctggaggatcttcaaatgacaacgcctacttcggctacagcaccccctgggggtattttgacttcaacagattccactgccacttctcaccacgtgaccggcagcgactcatcaacaacaactggggattccggcctaagcgactcaacttcaagctcttcaacattcaggtcaaagaggttacggacaacaatggagtcaagaccatcgccaataaccttaccagcacggtccaggtcttcacggactcagactatcagctcccgtacgtgctcgggtcggctcacgagggctgcctcccgccgttcccagcggacgttttcatgattcctcagtacgggtatctgacgcttaatgatggaagccaggccgtgggtcgttcgtccttttactgcctggaatatttcccgtcgcaaatgctaagaacgggtaacaacttccagttcagctacgagtttgagaacgtacctttccatagcagctacgctcacagccaaagcctggaccgactaatgaatccactcatcgaccaatacttgtactatctctcaaagactattaacggttctggacagaatcaacaaacgctaaaattcagtgtggccggacccagcaacatggctgtccagggaagaaactacatacctggacccagctaccgacaacaacgtgtctcaaccactgtgactcaaaacaacaacagcgaatttgcttggcctggagcttcttcttgggctctcaatggacgtaatagcttgatgaatcctggacctgctatggccagccacaaagaaggagaggaccgtttctttcctttgtctggatctttaatttttggcaaacaaggaactggaagagacaacgtggatgcggacaaagtcatgataaccaacgaagaagaaattaaaactactaacccggtagcaacggagtcctatggacaagtggccacaaaccaccagagtgcccaagcacaggcgcagaccggctgggttcaaaaccaaggaatacttccgggtatggtttggcaggacagagatgtgtacctgcaaggacccatttgggccaaaattcctcacacggacggcaactttcacccttctccgctgatgggagggtttggaatgaagcacccgcctcctcagatcctcatcaaaaacacacctgtacctgcggatcctccaacggccttcaacaaggacaagctgaactctttcatcacccagtattctactggccaagtcagcgtggagatcgagtgggagctgcagaaggaaaacagcaagcgctggaacccggagatccagtacacttccaactattacaagtctaataatgttgaatttgctgttaatactgaaggtgtatatagtgaaccccgccccattggcaccagatacctgactcgtaatctg

SEQ ID NO: 634 - DNA, 2208 bp, Artificial Sequence
  source: /note="Description of Artificial Sequence: Synthetic polynucleotide"
atggctgccgatggttatcttccagattggctcgaggacaaccttagtgaaggaattcgcgagtggtgggctttgaaacctggagcccctcaacccaaggcaaatcaacaacatcaagacaacgctcgaggtcttgtgcttccgggttacaaataccttggacccggcaacggactcgacaagggggagccggtcaacgcagcagacgcggcagccctcgagcacgacaaggcctacgaccagcagctcaaggccggagacaacccgtacctcaagtacaaccacgccgacgccgagttccaggagcggctcaaagaagatacgtcttttgggggcaacctcgggcgagcagtcttccaggccaaaaagaggcttcttgaacctcttggtctggttgaggaagcggctaagacggctcctggaaagaagaggcctgtagagcagtctcctcaggaaccggactcctccgcgggtattggcaaatcgggtgcacagcccgctaaaaagagactcaatttcggtcagactggcgacacagagtcagtcccagaccctcaaccaatcggagaacctcccgcagccccctcaggtgtgggatctcttacaatggcttcaggtggtggcgcaccagtggcagacaataacgaaggtgccgatggagtgggtagttcctcgggaaattggcattgcaattcccaatggctgggggacagagtcatcaccaccagcacccgaacctgggccctgcccacctacaacaatcacctctacaagcaaatctccaacagcacatctggaggatcttcaaatgacaacgcctacttcggctacagcaccccctgggggtattttgacttcaacagattccactgccacttctcaccacgtgactggcagcgactcatcaacaacaactggggattccggcctaagcgactcaacttcaagctcttcaacattcaggtcaaagaggttacggacaacaatggagtcaagaccatcgccaataaccttaccagcacggtccaggtcttcacggactcagactatcagctcccgtacgtgctcgggtcggctcacgagggctgcctcccgccgttcccagcggacgttttcatgattcctcagtacgggtatctgacgcttaatgatggaagccaggccgtgggtcgttcgtccttttactgcctggaatatttcccgtcgcaaatgctaagaacgggtaacaacttccagttcagctacgagtttgagaacgtacctttccatagcagctacgctcacagccaaagcctggaccgactaatgaatccactcatcgaccaatacttgtactatctctcaaagactattaacggttctggacagaatcaacaaacgctaaaattcagtgtggccggacccggcaacatggctgtccagggaagaaactacatacctggacccagctaccgacaacaacgtgtctcaaccactgtgactcaaaacaacaacagcgaatttgcttggcctggagcttcttcttgggctctcaatggacgtaatagcttgatgaatcctggacctgctatggccagccacaaagaaggagaggaccgtttctttcctttgtctggatctttaatttttggcaaacaaggaactggaagagacaacgtggatgcggacaaagtcatgataaccaacgaagaagaaattaaaactactaacccggtagcaacggagtcctatggacaagtggccacaaaccaccagagtgcccaagcacaggcgcagaccggctgggttcaaaaccaaggaatacttccgggtatggtttggcaggacagagatgtgtacctgcaaggacccatttgggccaaaattcctcacacggacggcaactttcacccttctccgctgatgggagggtttggaatgaagcacccgcctcctcagatcctcatcaagaacacacctgtacctgcggatcctccaacggccttcaacaaggacaagctgaactctttcatcacccagtattctactggccaagtcagcgtggagatcgagtgggagctgcagaaggaaaacagcaagcgctggaacccggagatccagtacacttccaactattacaagtctaataatgttgaatttgctgttaatactgaaggtgtatatagtgaaccccgccccattggcaccagatacctgactcgtaatctg

SEQ ID NO: 635 - DNA, 2208 bp, Artificial Sequence
  source: /note="Description of Artificial Sequence: Synthetic polynucleotide"
atggctgccgatggttatcttccagattggctcgaggacaaccttagtgaaggaattcgcgagtggtgggctttgaaacctggagcccctcaacccaaggcaaatcaacaacatcaagacaacgctcgaggtcttgtgcttccgggttacagataccttggacccggcaacggactcgacaagggggagccggtcaacgcagcagacgcggcggccctcgagcacgacaaggcctacgaccagcagctcaaggccggagacaacccgtacctcaagtacaaccacgccgacgccgagttccaggagcggctcaaagaagatacgtcttttgggggtaacctcgggcgagcagtcttccaggccaaaaagaggcttcttgaacctcttggtctggttgaggaagcggctaagacggctcctggaaagaagaggcctgtagagcagtctcctcaggaaccggactcctccgcgggtatcggcaaatcgggtgcacagcccgctaaaaagagactcaatttcggtcagactggcgacacagagtcagtcccagaccctcaaccaatcggagaacctcccgcagccccctcaggtgtgggatctcttacaatggcttcaggtggtggcgcaccagtggcagacaataacgaaggtgccgatggagtgggtagttcctcgggaaattggcattgcgattcccaatggctgggggacagagtcatcaccaccagcacccgaacctgggccctgcccacctacaacaatcacctctacaagcaaatctccaacagcacatctggaggatcttcaaatgacaacgcctacttcggctacagcaccccctgggggtattttgacttcaacagattccactgccacttctcaccacgtgactggcagcgactcatcaacaacaactggggattccggcctaagcgactcaacttcaagctcttcaacattcaggtcaaagaggttacggacaacaatggagtcaagaccgtcgccaataaccttaccagcacggtccaggtcttcacggactcagactatcagctcccgtacgtgctcgggtcggctcacgagggctgcctcccgccgttcccagcggacgttttcatgattcctcagtacgggtatctgacgcttaatgatggaagccaggccgtgggtcgttcgtccttttactgcctggaatatttcccgtcgcaaatgctaagaacgggtaacaacttccagttcagctacgagtttgagaacgtacctttccatagcagctacgctcacagccaaagcctggaccgactaatgaatccactcatcgaccaatacttgtactatctctcaaagactattaacggttctggacagaatcaacaaacgctaaaattcagtgtggccggacccagcaacatggctgtccagggaagaaactacatacctggacccagctaccgacaacaacgtgtctcaaccactgtgactcaaaacaacaacagcgaatttgcttggcctggagcttcttcttgggctctcaatggacgtaatagcttgatgaatcctggacctgctatggccagccacaaagaaggagaggaccgtttctttcctttgtctggatctttaatttttggcaaacaaggaactggaagagacaacgtggatgcggacaaagtcatgataaccaacgaagaagaaattaaaactactaacccggtagcaacggagtcctatggacaagtggccacaaaccaccagagtgcccaagcacaggcgcagaccggctgggttcaaaaccaaggaatacttccgggtatggtttggcaggacagagatgtgtacctgcaaggacccatttgggccaaaattcctcacacggacggcaactttcacccttctccgctgatgggagggtttggaatgaagcacccgcctcctcagatcctcatcaaaaacacacctgtacctgcggatcctccaacggccttcaacaaggacaagctgaactctttcatcacccagtattctactggccaagtcagcgtggagatcgagtgggagctgcagaaggaaaacagcaagcgctggaacccggagatccagtacacttccaactattacaagtctaataatgttgaatttgctgttaatactgaaggtgtatatagtggaccccgccccattggcaccagatacctgactcgtaatctg

SEQ ID NO: 636 - DNA, 2208 bp, Artificial Sequence
  source: /note="Description of Artificial Sequence: Synthetic polynucleotide"
atggctgccgatggttatcttccagattggctcgaggacaaccttagtgaaggaattcgcgagtggtgggctttgaaacctggagcccctcaacccaaggcaaatcaacaacatcaagacaacgctcgaggtcttgtgcttccgggttacaaataccttggacccggcaacggactcgacaagggggagccggtcaacgcagcagacgcggcggccctcgagcacgacaaggcctacgaccagcagctcaaggccggagacaacccgtacctcaagtacaaccacgccgacgccgagttccaggagcggctcaaagaagatacgtcttttgggggcaacctcgggcgagcagtcttccaggccaaaaagaggcttcttgaacctcttggtctggttgaggaagcggctaagacggctcctggaaagaagaggcctgtagagcagtctcctcaggaaccggactcctccgcgggtattggcaaatcgggtgcacagcccgctaaaaagagactcaatttcggtcagactggcgacacagagtcagtcccagaccctcaaccaatcggagaacctcccgcagccccctcaggtgtgggatctcttacaatggcttcaggtggtggcgcaccagtggcagacaataacgaaggtgccgatggagtgggtagttcctcgggaaattggcattgcgattcccaatggctgggggacagagtcatcaccaccagcacccgaacctgggccctgcccacctacaacaatcacctctacaagcaaatctccaacagcacatctggaggatcttcaaatgacaacgcctacttcggctacagcaccccctgggggtattttgacttcaacagattccactgccacttctcaccacgtgactggcagcgactcatcaacaacaactggggattccggcctaagcgactcaacttcaagctcttcaacattcaggtcaaagaggttacggacaacaatggagtcaagaccatcgccaataaccttaccagcacggtccaggtcttcacggactcagactatcagctcccgtacgtgctcgggtcggctcacgagggctgcctcccgccgttcccagcggacgttttcatgattcctcagtacgggtatctgacgcttaatgatggaagccaggccgtgggtcgttcgtccttttactgcctggaatatttcccgtcgcaaatgctaagaacgggtaacaacttccagttcagctacgagtttgagaacgtacctttccatagcagctacgctcacagccaaagcctggaccgactaatgaatccactcatcgaccaatacttgtactatctctcaaagactattaacggttctggacagaatcaacaaacgctaaaattcagtgtggccggacccagcaacatggctgtccagggaagaaactacatacctggacccagctaccgacaacaacgtgtctcaaccactgtgactcaaaacaacaacagcgaatttgcttggcctggagcttcttcttgggctctcaatggacgtaatagcttgatgaatcctggacctgctatggccagccacaaagaaggagaggaccgtttctttcctttgtctggatctttaatttttggcaaacaaggaactggaagagacaacgtggatgcggacaaagtcatgataaccaacgaagaagaaattaaaactactaacccggtagcaacggagtcctatggacaagtggccacaaaccaccagagtgcccaagcacaggcgcagaccggctgggttcaaaaccaaggaatacttccgggtatggtttggcaggacagagatgtgtacctgcaaggacccatttgggccaaaattcctcacacggacggcaactttcacccttctccgctgatgggagggtttggaatgaagcacccgcctcctcagatcctcatcaaaaacacacctgtacctgcggatcctccaacggccttcaacaaggacaagctgaactctttcatcacccagtattctactggccaagtcagcgtggagatcgagtgggagctgcagaaggaaaacagcaagcgctggaacccggagatccagtacacttccaactattacaagtctaataatgttgaatttgctgttaatactgaaggtgtatatagtgaaccccgccccattggcaccagatacctgactcgtaatctg

SEQ ID NO: 637 - DNA, 2208 bp, Artificial Sequence
  source: /note="Description of Artificial Sequence: Synthetic polynucleotide"
atggctgccgatggttatcttccagattggctcgaggacaaccttagtgaaggaattcgcgagtggtgggctttgaaacctggagcccctcaacccaaggcaaatcaacaacgtcaagacaacgctcgaggtcttgtgcttccgggttacaaataccttggacccggcaacggactcgacaagggggagccggtcaacgcagcagacgcggcggccctcgagcacgacaaggcctacgaccagcagctcaaggccggaggcaacccgtgcctcaagtacaaccacgccgacgccgagttccaggagcggctcaaagaagatacgtcttttgggggcaacctcgggcgagcagtcttccaggccaaaaagaggcttcttgaacctcttggtctggttgaggaagcggctaagacggctcctggaaagaagaggcctgtagagcagtctcctcaggaaccggactcctccgcgggtattggcagatcgggtgcacagcccgctaaaaagagactcaatttcggtcagactggcgacacagagtcagtcccagaccctcaaccaatcggagaacctcccgcagccccctcaggtgtgggatctcttacaatggcttcaggtggtggcgcaccagtggcagacaataacgaaggtgccgatggagtgggtagttcctcgggaaattggcattgcgattcccaatggctgggggacagagtcatcaccaccagcacccgaacctgggccctgcccacctacaacaatcacctctacaagcaaatctccaacagcacatctggaggatcttcaaatgacaacgcctacttcggctacagcaccccctgggggtattttgacttcaacagattccactgccacttctcaccacgtgactggcagcgactcatcaacaacaactggggattccggcctaagcgactcaacttcaagctcttcaacattcaggtcaaagaggttacggacaacaatggagtcaaggccatcgccaataaccttaccagcacggtccaggtcttcacggactcagactatcagctcccgtacgtgctcgggtcggctcacgagggctgcctcccgccgttcccagcggacgttttcatgattcctcagtacgggtatctgacgcttaatgatggaagccaggccgtgggtcgttcgtccttttactgcctggaatatttcccgtcgcaaatgctaagaacgggtaacaacttccagttcagctacgagtttgagaacgtacctttccatagcagctacgctcacagccaaagcctggaccgactaatgaatccactcatcgaccaatacttgtactatctctcaaagactattgacggttctggacagaatcaacaaacgctaaaattcagtgtggccggacccagcaacatggctgtccagggaagaaactacatacctggacccagctaccgacaacaacgtgtctcaaccactgtgactcaaaacaacaacagcgaatttgcttggcctggagcttcttcttgggctctcaatggacgtaatagcttgatggatcctggacctgctatggccagccacaaagaaggagaggaccgtttctttcctttgtctggatctttaatttttggcaaacaaggaactggaagagacaacgtggatgcggacaaagtcatgataaccaacgaagaagaaattaaaactactaacccggtagcaacggagtcctatggacaagtggccacaaaccaccagagtgcccaagcacaggcgcagaccggctgggttcaaaaccaaggaatacttccgggtatggtttggcaggacagagatgtgtacctgcaaggacccatttgggccaaaattcctcacacgggcggcaactttcacccttctccgctgatgggagggtttggaatgaagcacccgcctcctcagatcctcatcaaaaacacacctgtacctgcggatcctccaacggccttcaacaaggacaagctgaactctttcatcacccagtattctactggccaagtcagcgtggagatcgagtgggagctgcagaaggaaaacagcaagcgctggaacccggagatccagtacacttccaactattacaagtctaataatgttgaatttgctgttaatactgaaggtgtatatagtgaaccccgccccattggcaccagatacctgactcgtaatctg

SEQ ID NO: 638 - DNA, 2208 bp, Artificial Sequence
  source: /note="Description of Artificial Sequence: Synthetic polynucleotide"
atggctgccgatggttatcttccagattggctcgaggacaaccttagtgaaggaattcgcgagtggtgggctttgaaacctggagcccctcaacccaaggcaaatcaacaacatcaagacaacgctcgaggtcttgtgcttccgggttacaaataccttggacccggcaacggactcgacaagggggagccggtcaacgcagcagacgcggcggccctcgagcacgacaaggcctacgaccagcagctcaaggccggagacaacccgtacctcaagtacaaccacgccgacgccgagttccaggagcggctcaaagaagatacgtcttttgggggcaacctcgggcgagcagtcttccaggccaaaaagaggcttcttgaacctcttggtctggttgaggaagcggctaagacggctcctggaaagaagaggcctgtagagcagtctcctcaggaaccggactcctccgcgggtattggcaaatcgggtgcacagcccgctaaaaagagactcaatttcggtcagactggcgacacagagtcagtcccagaccctcaaccaatcggagaacctcccgcagccccctcaggtgtgggatctcttacaatggcttcaggtggtggcgcaccagtggcagacaataacgaaggtgccgatggagtgggtagttcctcgggaaattggcattgcgattcccaatggctgggggacagagtcatcaccaccagcacccgaacctgggccctgcccacctacaacaatcacctctacaagcaaatctccaacagcacatctggaggatcttcaaatgacaacgcctacttcggctacagcaccccctgggggtattttgacttcaacagattccactgccacttctcaccacgtgactggcagcgactcatcaacaacaactggggattccggcctaagcgactcaacttcaagctcttcaacattcaggtcaaagaggttacggacaacaatggagtcaagaccatcgccaataaccttaccagcacggtccaggtcttcacggactcagactatcagctcccgtacgtgctcgggtcggctcacgagggctgcctcccgccgttcccagcggacgttttcatgattcctcagtacgggtatctgacgcttaatgatggaagccaggccgtgggtcgttcgtccttttactgcctggaatatttcccgtcgcaaatgctaagaacgggtaacaacttccagttcagctacgagtttgagaacgtacctttccatagcagctacgctcacagccaaagcctggaccgactaatgaatccactcatcgaccaatacttgtactatctctcaaagactattaacggttctggacagaatcaacaaacgctaaaattcagtgtggccggacccagcaacatggctgtccagggaagaaactacatacctggacccagctaccgacaacaacgtgtctcaaccactgtgactcaaaacaacaacagcgaatttgcttggcctggagcttcttcttgggctctcaatggacgtaatagcttgatgaatcctggacctgctatggccagccacaaagaaggagaggaccgtttctttcctttgtctggatctttaatttttggcaaacaaggaactggaagagacaacgtggatgcggacaaagtcatgataaccaacgaagaagaaattaaaactactaacccggtagcaacggagtcctatggacaagtggccacaaaccaccagagtgcccaagcacaggcgcagaccggctgggttcaaaaccaaggaatacttccgggtatggtttggcaggacagagatgtgtacctgcaaggacccatttgggccaaaattcctcacacggacggcaactttcacccttctccgctgatgggagggtttggaatgaagcacccgcctcctcagatcctcatcaaaaacacacctgtacctgcggatcctccaacggccttcaacaaggacaagctgaactctttcatcacccagtattctactggccaagtcagcgtggagatcgagtgggagctgcagaaggaaaacagcaagcgctggaacccggagatccagtacacttccaactattacaagcctaataatgttgaatttgctgttaatactgaaggtgtatatagtgaaccccgccccattggcaccagatacctgactcgtaatctg

SEQ ID NO: 639 - DNA, 2208 bp, Artificial Sequence
  source: /note="Description of Artificial Sequence: Synthetic polynucleotide"
atggctgccgatggttatcttccagattggctcgaggacaaccttagtgaaggaattcgcgagtggtgggctttgaaacctggagcccctcaacccaaggcaaatcaacaacatcaagacaacgctcgaggtcttgtgcttccgggttacaaataccttggacccggcaacggactcgacaagggggagccggtcaacgcagcagacgcggcggccctcgagcacaacaaggcctacgaccagcagctcaaggccggagacaacccgtacctcaagtgcaaccacgccgacgccgagttccaggagcggctcaaagaagatacgtcttttgggggcaacctcgggcgagcagtcttccaggccaaaaagaggcctcttgaacctcttggtctggttgaggaagcggctaagacggctcctggaaagaagaggcctgtagagcagtctcctcaggaaccggactcctccgcgggtattggcaaatcgggtgcacagcccgctaaaaagagactcaatttcggtcagactggcgacacagagtcagtcccagaccctcaaccaatcggagaacctcccgcagccccctcaggtgtgagatctcttacaatggcttcaggtggtggcgcaccagtggcagacaataacgaaggtgccgatggagtgggtagttcctcgggaaattggcattgcgattcccaatggctgggggacagagtcatcaccaccagcacccgaacctgggccctgcccacctacaacaatcacctctacaagcaaatctccaacagcacatctggaggatcttcaaatgacaacgcctacctcggctacagcaccccctgggggtattttgacttcaacagattccactgccacttctcaccacgtgactggcagcgactcatcaacaacaactggggattccggcctaagcgactcaacttcaagctcttcaacattcaggtcaaagaggttacggacaacaatggagtcaagaccatcgccaataaccttaccagcacggtccaggtcttcacggactcagactatcagctcccgtacgtgctcgggtcggctcacgagggctgcctcccgccgttcccagcggacgttttcatgattcctcagtacgggtatctgacgcttaatgatggaagccaggccgtgggtcgttcgtccttttactgcctggaatatttcccgtcgcaaatgctaagaacgggtaacaacttccagttcagctacgagtttgagaacgtacctttccatagcagctacgctcacagccaaagcctggaccgactaatgaatccactcatcgaccaatacttgtactatctctcaaagactattaacggttctggacagaatcaacaaacgctaaaattcagtgtggccggacccagcaacatggctgtccagggaagaaactacatacctggacccagctaccgacaacaacgtgtctcaaccactgtgactcaaaacaacaacagcgaatttgcttggcctggagcttcttcttgggctctcaatggacgtaatagcttgatgaatcctggacctactatggccagccacaaagaaggagaggaccgtttctttcctttgtctggatctttaatttttggcaaacaaggaactggaagagacaacgtggatgcggacaaagtcatgataaccaacgaagaagaaattaaaactactaacccggtagcaacggagtcctatggacaagtggccacaaaccaccagagtgcccaagcacaggcgcagaccggctgggttcaaaaccaaggaatacttccgggtatggtttggcaggacagagatgtgtacctgcaaggacccatttgggccaaaattcctcacacggacggcaactttcacccttctccgctgatgggagggtttggaatgaagcacccgcctcctcagatcctcatcaaaaacacacctgtacctgcggatcctccaacggccttcaacaaggacaagctgaactctttcatcacccagtattctactggccaagtcagcgtggagatcgagtgggagctgcagaaggaaaacagcaagcgctggaacccggagatccagtacacttccaactattacaagtctaataatgttgaatttgctgttaatactgaaggtgtatatagtgaaccccgccccattggcaccagatacctgactcgtaatctg

SEQ ID NO: 640 - DNA, 2208 bp, Artificial Sequence
  source: /note="Description of Artificial Sequence: Synthetic polynucleotide"
atggctgccgatggttatcttccagattggctcgaggacaaccttagtgaaggaattcgcgagtggtgggctttgaaacctggagcccctcaacccaaggcaaatcaacaacatcaagacaacgctcgaggtcttgtgcttccgggttacaaataccttggacccggcaacggactcgacaagggggagccggtcaacgcagcagacgcggcggccctcgtgcacgacaaggcctacgaccagcagctcaaggccggagacaacccgtacctcaagtgcaaccacgccgacgccgagttccaggagcggctcaaagaagatacgtcttttgggggcaacctcgggcgagcagtcttccaggccaaaaagaggcttcttgaacctcttggtctggttgaggaagcggctaagacggctcctggaaagaagaggcctgtagagcagtctcctcaggaaccggactcctccgcgggtattggcaaatcgggtgcacagcccgctaaaaagagactcaatttcggtcagactggcgacacagagtcagtcccagaccctcaaccaatcggagaacctcccgcagccccctcaggtgtgggatctcttacaatggcttcaggtggtggcgcaccagtggcagacaataacgaaggtgccgatggagtgggtagttcctcgggaaattggcattgcgattcccaatggctgggggacagagtcatcaccaccagcacccgaacctgggccctgcccacctacaacaatcacctctacaagcaaatctccaacagcacatctggaggatcttcaaatgacaacgcctacctcggctacagcaccccctgggggtattttgacttcaacagattccactgccacttctcaccacgtgactggcagcgactcatcaacaacaactggggattccggcctaagcgactcaacttcaagctcttcaacattcaggtcaaagaggttacggacaacaatggagtcaagaccatcgccaataaccttaccagcacggtccaggtcttcacggactcagactatcagctcccgtacgtgctcgggtcggctcacgagggctgcctcccgccgttcccagcggacgttttcacgattcctcagtacgggtatctgacgcttaatgatggaagccaggccgtgggtcgttcgtccttttactgcctggaatatttcccgtcgcaaatgctaagaacgggtaacaacttccagttcagctacgagtttgagaacgtacctttccatagcagctacgctcacagccaaagcctggaccgactaatgaatccactcatcgaccaatacttgtactatctctcaaagactattaacggttctggacagaatcaacaaacgctaaaattcagtgtggccggacccagcaacatggctgtccagggaagaaactacatacctggacccagctaccgacaacaacgtgtctcaaccactgtgactcaaaacaacaacagcgaatttgcttggcctggagcttcttcttgggctctcaatggacgtaatagcttgatgaatcctggacctgctatggccagccacaaagaaggagaggaccgtttctttcctttgtctggatctttaatttttggcaaacaaggaactggaagagacaacgtggatgcggacaaagtcatgataaccaacgaagaagaaattaaaactactaacccggtagcaacggagtcctatggacaagtggccacaaaccaccagagtgcccaagcacaggcgcagaccggctgggttcaaaaccaaggaatacttccgggtatggtttggcaggacagagatgtgtacctgcaaggacccatttgggccaaaattcctcacacggacggcaactttcacccttctccgctgatgggagggtttggaatgaagcacccgcctcctcagatcctcatcaaaaacacacctgtacctgcggatcctccaacggccttcaacaaggacaagctgaactctttcatcacccagtattctactggccaagtcagcgtggagatcgagtgggagctgcagaaggaaaacagcaagcgctggaacccggagatccagtacacttccaactattacaagtctaataatgttgaatttgctgttaatactgaaggtgtatatagtgaaccccgccccattgggccccgatacctgactcgtaatttt

SEQ ID NO: 641 - DNA, 2208 bp, Artificial Sequence
  source: /note="Description of Artificial Sequence: Synthetic polynucleotide"
atggctgccgatggttatcttccagattggctcgaggacaaccttagtgaaggaattcgcgagtggtgggctttgaaacctggagcccctcaacccaaggcaaatcaacaacatcaagacaacgctcgaggtcttgtgcttccgggttacaaataccttggacccggcaacggactcgacaagggggagccggtcaacgcagcagacgcggcggccctcgagcacaacaaggcctacgaccagcagctcaaggccggagacaacccgtacctcaagtgcaaccacgccgacgccgagttccaggagcggctcaaagaagatacgtcttttgggggcaacctcgggcgagcagtcttccaggccaaaaagaggcttcttgaacctcttggtctggttgaggaagcggctaagacggctcctggaaagaagaggcctgtagagcagtctcctcaggaaccggactcctccgcgggtattggcaaatcgggtgcacagcccgctaaaaagagactcaatttcggtcagactggcgacacagagtcagtcccagaccctcaaccaatcggagaacctcccgcagccccctcaggtgtgagatctcttacaatggcttcaggtggtggcgcaccagtggcagacaataacgaaggtgccgatggagtgggtagttcctcgggaaattggcattgcgattcccaatggctgggggacagagtcatcaccaccagcacccgaacctgggccctgcccacctacaacaatcacctctacaagcaaatctccaacagcacatctggaggatcttcaaatgacaacgcctacctcggctacagcaccccctgggggtattttgacttcaacagattccactgccacttctcaccacgtgactggcagcgactcatcaacaacaactggggattccggcctaagcgactcaacttcaagctcttcaacattcaggtcaaagaggttacggacaacaatggagtcaagaccatcgccaataaccttaccagcacggtccaggtcttcacggactcagactatcagctcccgtacgtgctcgggtcggctcacgagggctgcctcccgccgttcccagcggacgttttcatgattcctcagtacgggtatctgacgcttaatgatggaagccaggccgtgggtcgttcgtccttttactgcctggaatatttcccgtcgcaaatgctaagaacgggtaacaacttccagttcagctacgagtttgagaacgtacctttccatagcagctacgctcacagccaaagcctggaccgactaatgaatccactcatcgaccaatacttgtactatctctcaaagactattaacggttctggacagaatcaacaaacgctaaaattcagtgtggccggacccagcaacatggctgtccagggaagaaactacatacctggacccagctaccgacaacaacgtgtctcaaccactgtgactcaaaacaacaacagcgaatttgcttggcctggagcttcttcttgggctctcaatggacgtaatagcttgatgaatcctggacctgctatggccagccacaaagaaggagaggaccgtttctttcctttgtctggatctttaatttttggcaaacaaggaactggaagagacaacgtggatgcggacaaagtcatgataaccaacgaagaagaaattaaaactactaacccggtagcaacggagtcctatggacaagtggccacaaaccaccagagtgcccaagcacaggcgcagaccggctgggttcaaaaccaaggaatacttccgggtatggtttggcaggacagagatgtgtacctgcaaggacccatttgggccaaaattcctcacacggacggcaactttcacccttctccgctgatgggagggtttggaatgaagcacccgcctcctcagatcctcatcaaaaacacacctgtacctgcggatcctccaacggccttcaacaaggacaagctgaactctttcatcacccagtattctactggccaagtcagcgtggagatcgagtgggagctgcagaaggaaaacagcaagcgctggaacccggagatccagtacacttccaactattacaagtctaataatgttgaatttgctgttaatactgaaggtgtatatagtgaaccccgccccattggcaccagatacctgactcgtaatctg

SEQ ID NO: 642 - DNA, 2208 bp, Artificial Sequence
  source: /note="Description of Artificial Sequence: Synthetic polynucleotide"
atggctgccgatggttatcttccagattggctcgaggacaaccttagtgaaggaattcgcgagtggtgggctttgaaacctggagcccctcaacccaaggcaaatcaacaacatcaagacaacgctcgaggtcttgtgcttccgggttacaaataccttggacccggcaacggactcgacaagggggagccggtcaacgcagcagacgcggcggccctcgagcacgacaaggcctacgaccagcagctcaaggccggagacaacccgtacctcaagtgcaaccacgccgacgccgagttccaggagcggctcaaagaagatacgtcttttgggggcaacctcgggcgagcagtcttccaggccaaaaagaggcttcttgaacctcttggtctggttgaggaagcggctaagacggctcctggaaagaagaggcctgtagagcagtctcctcaggaaccggactcctccgcgggtattggcaaatcgggtgcacagcccgctaaaaagagactcaatttcggtcagactggcgacacagagtcagtcccagaccctcaaccaatcggagaacctcccgcagccccctcaggtgtgggatctcttacaatggcttcaggcggtggcgcaccagtggcagacaataacgaaggtgccgatggagtgggtagttcctcgggaaattggcattgcgattcccaatggctgggggacagagtcatcaccaccagcacccgaacctgggccctgcccacctacaacaatcacctctacaagcaaatctccaacagcacatctggaggatcttcaaatgacaacgcctacctcggctacagcaccccctgggggtattttgacttcaacagattccactgccacttctcaccacgtgactggcagcgactcatcaacaacaactggggattccggcctaagcgactcaacttcgagctcttcaacattcaggtcaaagaggttacggacaacaatggagtcaagaccatcgccaataaccttaccagcacggtccaggtcttcacggactcagactatcagctcccgtacgtgctcgggtcggctcacgagggctgcctcccgccgttcccagcggacgttttcatgattcctcagtacgggtatctgacgcttaatgatggaagccaggccgtgggtcgttcgtccttttactgcctggaatatttcccgtcgcaaatgctaagaacgggtaacaacttccagtccagctacgagtttgagaacgtacctttccatagcagctacgctcacagccaaagcctggaccgactaatgaatccactcatcgaccaatacttgtactatctctcaaagactattaacggttctggacagaatcaacaaacgctaaaattcagtgtggccggacccagcaacatggctgtccagggaagaaactacatacctggacccagctaccgacaacaacgtgcctcaaccactgtgactcaaaacaacaacagcgaatttgcttggcctggagcttcttcttgggctctcaatggacgtaatagcttgatgaatcctggacctgctatggccagccacaaagaaggggaggaccgtttctttcctttgtctggatctttaatttttggcaaacaaggaactggaagagacaacgtggatgcggacaaagtcatgataaccaacgaagaagaaattaaaactactaacccggtagcaacggagtcctatggacaagtggccacaaaccaccagagtgcccaagcacaggcgcagaccggctgggttcaaaaccaaggaatacttccgggtatggtttggcaggacagagatgtgtacctgcaaggacccatttgggccaaaattcctcacacggacggcaactttcacccttctccgctgatgggagggtttggaatgaagcacccgcctcctcagatcctcatcaaaaacacacctgtacctgcggatcctccaacggccttcaacaaggacaagctgaactctttcatcacccagtattctactggccaagtcagcgtggagatcgagtgggagctgcagaaggaaaacagcaagcgctggaacccggagatccagtacacttccaactattacaagtctaataatgttgaatttgctgttaatactgaaggtgtatatagtgaaccccgccccattggcaccagatacctgactcgtaatctg

SEQ ID NO: 643 - DNA, 2208 bp, Artificial Sequence
  source: /note="Description of Artificial Sequence: Synthetic polynucleotide"
atggctgccgatggttatcttccagattggctcgaggacaaccttagtgaaggaattcgcgagtggtgggctttgaaacctggagcccctcaacccaaggcaaatcaacaacatcaagacaacgctcgaggtcttgtgcttccgggttacaaataccttggacccggcaacggactcgacaagggggagccggtcaacgcagcagacgcggcggccctcgagcacgacaaggcctacgaccagcagctcaaggccggagacaacccgtacctcaagtgcaaccacgccgacgccgagttccaggagcggctcaaagaagatacgtcttttgggggcaacctcgggcgagcagtcttccaggccaaaaagaggcttcttgaacctcttggtctggttgaggaagcggctaagacggctcctggaaagaagaggcctgtagagcagtctcctcaggaaccggactcctccgcgggtattggcaaatcgggtgcacagcccgctaaaaagagactcaatttcggtcagactggcgacacagagtcagtcccagaccctcaaccaatcggagaacctcccgcagcccccccaggtgtgggatctcttacaatggcttcaggtggtggcgcaccagtggcggacaataacgaaggtgccgatggagtgggtagttcctcgggaaattggcattgcgattcccaatggctgggggacagagtcatcaccaccagcacccgaacctgggccctgcccacctacaacaatcacctctacaagcaaatctccaacagcacatctggaggatcttcaaatgacaacgcctacctcggctacagcaccccctgggggtattttgacttcaacagattccactgccacttctcaccacgtgactggcagcgactcatcaacaacaactggggattccggcctaagcgactcaacttcaagctcttcaacattcaggtcaaagaggttacggacaacaatggagtcaagaccatcgccaataaccttaccagcacggtccaggtcttcacggactcagactatcagctcccgtacgtgctcgggtcggctcacgagggctgcctcccgccgttcccagcggacgttttcatgattcctcagtacgggtatctgacgcttaatgatggaagccaggccgtgggtcgttcgtccttttactgcctggaatatttcccgtcgcaaatgctaagaacgggtaacaacttccagttcagctacgagtttgagaacgtacctttccatagcagctacgctcacagccaaagcctggaccgactaatgaatccactcatcgaccaatacttgtactatctctcaaagactattagcggttctggacagaatcaacaaacgctaaaattcagtgtggccggacccagcaacatggctgtccagggaagaaactacatacctggacccagctaccgacaacaacgtgtctcaaccactgtgactcaaaacaacagcagcgaatttgcttggcctggagcttcttcttgggctctcaatggacgtaatagcttgatgaatcctggacctgctatggccagccacaaagaaggagaggaccgtttctttcctttgtctggatctttaatttttggcaaacaaggaactggaagagacaacgtggatgcggacaaagtcatgataaccaacgaagaagaaattaaaactactaacccggtagcaacggagtcctatggacaagtggccacaaaccaccagagtgcccaagcacaggcgcagaccggctgggttcaaaaccaaggaatactttcgggtatggtttggcaggacagagatgtgtacctgcaaggacccatttgggccaaaattcctcacacggacggcaactttcacccttctccgctgatgggagggtttggaatgaagcacccgcctcctcagatcctcatcaaaaacacacctgtacctgcggatcctccaacggccttcaacaaggacaagctgaactctttcatcacccagtattctactggccaagtcagcgtggagatcgagtgggagctgcagaaggaaaacagcaagcgctggaacccggagatccagtacacttccaactattacaagtctaataatgttgaatttgctgttaatactgaaggtgtatatagtgaaccccgccccattggcaccagatacctgactcgtaatctg

SEQ ID NO: 644 - DNA, 2208 bp, Artificial Sequence
  source: /note="Description of Artificial Sequence: Synthetic polynucleotide"
atggctgccgatggttatcttccagattggctcgaggacaaccttagtgaaggaattcgcgagtggtgggctttgaaacctggagcccctcaacccaaggcaaatcaacaacatcaagacaacgctcgaggtcttgtgcttccgggttacaaataccttggacccggcaacggactcgacaagggggagccggtcaacgcagcagacgcggcggccctcgagcacgacaaggcctacgaccagcagctcaaggccggagacaacccgtacctcaagtgcaaccacgccgacgccgagttccaggagcggctcaaagaagatacgtcttttgggggcaacctcgggcgagcagtcttccaggccaaaaagaggcttcttgaacctcttggtctggttgaggaagcggctaagacggctcctggaaagaagaggcctgtagagcagtctcctcaggaaccggactcctccgcgggtattggcaaatcgggtgcacagcccgctaaaaagagactcaatttcggtcagactggcgacacagagtcagtcccagaccctcaaccaatcggagaacctcccgcagccccctcaggtgtgggatctcttacaatggcttcaggtggtggcgcaccagtggcagacaataacgaaggtgccgatggagtgggtagttcctcgggaaattggcattgcgattcccaatggctgggggacagagtcatcaccaccagcacccgaacctgggccctgcccacctacaacaatcacctctacaagcaaatctccaacagcacatctggaggatcttcaaatgacaacgcctacctcggctacagcaccccctgggggtattttgacttcaacagattccactgccacttctcaccacgtgactggcagcgactcatcaacaacaactggggattccggcctaagcgactcaacttcaagctcttcaacattcaggtcaaagaggttacggacaacaatggagtcaagaccatcgccaataaccttaccagcacggtccaggtcttcacggactcagactatcagctcccgtacgtgctcgggtcggctcacgagggctgcctcccgccgttcccagcggacgttttcatgattcctcagtacgggtatctgacgcttaatgatggaagccaggccgtgggtcgttcgtccttttactgcctggaatatttcccgtcgcaaatgctaagaacgggtaacaacttccagttcagctacgagtttgagaacgtacctttccatagcagctacgctcacagccaaagcctggaccgactaatgaatccactcatcgaccaatacttgtactatctctcaaagactattaacggttctggacagaatcaacaaacgctaaaattcagtgtggccggacccagcaacatggctgtccagggaagaaactacatacctggacccagctaccgacaacaacgtgtctcaaccactgtgactcaaaacaacaacagcgaatttgcttggcctggagcttcttcttgggctctcaatggacgtaatagcttgatgaatcctggacctgctatggccagccacaaagaaggagaggaccgtttctttcctttgtctggatctttaatttttggcaaacaaggaactggaagagacaacgtggatgcggacaaagtcatgataaccaacgaagaagaaattaaaactactaacccggtagcaacggagtcctatggacaagtggccacaaaccaccagagtgcccaagcacaggcgcagaccggctgggttcaaaaccaaggaatacttccgggtatggtttggcaggacagagatgtgtacctgcaaggacccatttgggccaaaattcctcacacggacggcaactttcacccttctccgctgatgggagggtttggaatgaagcacccgcctcctcagatcctcatcaaaaacacacctgtacctgcggatcctccaacggccttcaacaaggacaagctgaactctttcatcacccagtattctactggccaagtcagcgtggagatcgagtgggagctgcagaaggaaaacagcaagcgctggaacccggagatccagtacacttccaactattacaagtctaataatgttgaatttgctgttaatactgaaggtgtatatagtgaaccccgccccattggcaccagatacctgactcgtaatctg

SEQ ID NO: 645 - DNA, 2208 bp, Artificial Sequence; identical to SEQ ID NO: 644
  source: /note="Description of Artificial Sequence: Synthetic polynucleotide"

SEQ ID NO: 646 - DNA, 2208 bp, Artificial Sequence
  source: /note="Description of Artificial Sequence: Synthetic polynucleotide"
atggctgccgatggttatcttccagattggctcgaggacaaccttagtgaaggaattcgcgagtggtgggctttgaaacctggagcccctcaacccaaggcaaatcaacaacatcaagacaacgctcgaggtcttgtgcttccgggttacaaataccttggacccggcaacggactcgacaagggggagccggtcaacgcagcagacgcggcggccctcgagcacgacaaggcctacgaccagcagctcaaggccggagacaacccgtacctcaagtgcaaccacgccgacgccgagttccaggagcggctcaaagaagatacgtcttttgggggcaacctcgggcgagcagtcttccaggccaaaaagaggcttcttgaacctcttggtctggttgaggaagcggctaagacggctcctggaaagaagaggcctgtagagcagtctcctcaggaaccggactcctccgcgggtattggcaaatcgggtgcacagcccgctaaaaagagactcaatttcggtcagactggcgacacagagtcagtcccagaccctcaaccaatcggagaacctcccgcagccccctcaggtgtgggatctcttacaatggcttcaggtggtggcgcaccagtggcagacaataacgaaggtgccgatggagtgggtagttcctcgggaaattggcattgcgattcccaatggctgggggacagagtcatcaccaccagcacccgaacctgggccctgcccacctacaacaatcacctctacaagcaaatctccaacagcacatctggaggatcttcaaatgacaacgcctacctcgactacagcaccccctgggggtattttgacttcaacagattccactgccacttctcaccacgtgactggcagcggctcatcaacaacaactggggattccggcctaagcgactcaacttcaagctcttcaacattcaggtcaaagaggttacggacaacaatggagtcaagaccatcgccaataaccttaccagcacggtccaggtcttcacggactcagactatcagctcccgtacgtgctcgggtcggctcacgagggctgcctcccgccgttcccagcggacgttttcatgattcctcagtacgggtatctgacgcttaatgatggaagccaggccgtgggtcgttcgtccttttactgcctggaatatttcccgtcgcaaatgctaagaacgggtaacaacttccagttcagctacgagtttgagaacgtacctttccatagcagctacgctcacagccaaagcctggaccgactaatgaatccactcatcgaccaatacttgtactatctctcaaagactattaacggttctggacagaatcaacaaacgctaaaattcagtgtggccggacccagcaacatggctgtccagggaagaaactacatacctggacccagctaccgacaacaacgtgtctcaaccactgtgactcaaaacaacaacagcgaatttgcttggcctggagcttcttcttgggctctcaatggacgtaatagcttgatgaatcctggacctgctatggccagccacaaagaaggagaggaccgtttctttcctttgtctggatctttaatttttggcaaacaaggaactggaagagacaacgtggatgcggacaaagtcatgataaccaacgaagaagaaattaaaactactaacccggtagcaacggagtcctatggacaagtggccacaaaccaccagagtgcccaagcacaggcgcagaccggctgggttcaaaaccaaggaatacttccgggtatggtttggcagggcagagatgtgtacctgcaaggacccatttgggccaaaattcctcacacggacggcaactttcacccttctccgctgatgggagggtttggaatgaagcacccgcctcctcagatcctcatcaaaaacacacctgtacctgcggatcctccaacggccttcaacaaggacaagctgaactctttcatcacccagtattctactggccaagtcagcgtggagatcgagtgggagctgcagaaggaaaacagcaagcgctggaacccggagatccagtacacttccaactattacaagtctaataatgttgaatttgctgttaatactgaaggtgtatatagtgaaccccgccccattggcaccagatacctgactcgtaatctg

SEQ ID NO: 647 - DNA, 2208 bp, Artificial Sequence; identical to SEQ ID NO: 644
  source: /note="Description of Artificial Sequence: Synthetic polynucleotide"

SEQ ID NO: 648 - DNA, 2208 bp, Artificial Sequence
  source: /note="Description of Artificial Sequence: Synthetic polynucleotide"
atggctgccgatggttatcctccagattggctcgaggacaaccttagtgaaggaattcgcgagtggtgggctttgaaacctggagcccctcaacccaaggcaaatcaacaacatcaagacaacgctcgaggtcttgtgcttccgggttacaaataccttggacccggcaacggactcgacaagggggagccggtcaacgcagcagacgcggcggccctcgagcacgacaaggcctacgaccagcagctcaaggccggggacaacccgcacctcaagtacaaccacgccgacgccgagttccaggagcggctcaaagaagatacgtcttttgggggcaacctcgggcgagcagtcttccaggccaaaaagaggcttcttgaacctcttggtctggttgaggaagcggctaagacggctcctggaaagaagaggcccgtagagcagtctcctcaggaaccggactcctccgcgggtattggcaaatcgggtgcacagcccgctaagaagagactcaatttcggtcagactggcgacactgagtcagtcccagaccctcaaccaatcggagaacctcccgcagccccctcaggtgtgggatctcttacaatggcttcaggtggtggcgcaccagtggcagacaataacgaaggtgccgatggagtgggtagttcctcgggaaattggcattgcgattcccaatggctgggggacagagtcatcaccaccagcacccgaacctgggccctgcccacctacaacaatcacctctacaagcaaatctccaacagcacatctggaggatcttcaaatgacaacgcctacttcggctacagcaccccctgggggtattttgacttcaacagattccactgccacttctcaccacgtgactggcagcgactcatcaacaacaactggggattccggcctaagcgactcaacttcaagctcttcaacattcaggtcaaagaggttacggacaacaatggagtcaagaccatcgccaataaccttaccagcacggtccaggtcttcacggactcagactatcagctcccgtacgtgctcgggtcggctcacgagggctgcctcccgccgttcccagcggacgttttcatgattcctcagtacgggtatctgacgcttaatgatggaagccaggccgtgggtcgttcgtccttttactgcctggaatatttcccgtcgcaaatgctaagaacgggtaacaacttccagttcagctacgagtttgagaacgtacctttccatagcagctacgctcacagccaaagcctggaccgactaatgaatccactcatcgaccaatacttgtactatctctcaaagactattaacggttctggacagaatcaacaaacgctaaaattcagtgtggccggacccagcaacatggctgtccagggaagaaactacatacctggacccagctaccgacaacaacgtgtctcaaccactgtgactcaaaacaacaacagcgaatttgcttggcctggagcttcttcttgggctctcaatggacgtaatagcttgatgaatcctggacctgctatggccagccacaaagaaggagaggaccgtttctttcctttgtctggatctttaatttttggcaaacaaggaactggaagagacaacgtggatgcggacaaagtcatgataaccaacgaagaagaaattaaaactactaacccggtagcaacggagtcctatggacaagtggccacaaaccaccagagtgcccaagcacaggcgcagaccggctgggttcaaaaccaaggaatacttccgggtatggtttggcaggacagagatgtgtacctgcaaggacccatttgggccaaaattcctcacacggacggcaactttcacccttctccgctgatgggagggtttggagtgaagcacccgcctcctcagatcctcatcaaaaacacacctgtacctgcggatcctccaacggccttcaacaaggacaggctgaactctttcatcacccagtattctactggccaagtcagcgtggagatcgagtgggagctgcagaaggaaaacagcaagcgctggaacccggagatccagtacacttccaactattacaagtctaataatgttgaatttgctgttaatactgaaggtgtatatagtgaaccccgccccattggcaccagatacctgactcgtaatctg

SEQ ID NO: 649 - DNA, 2208 bp, Artificial Sequence
  source: /note="Description of Artificial Sequence: Synthetic polynucleotide"
atggctgccgatggttatcttccagattggctcgaggacaaccttagtgaaggaattcgcgagtggtgggctttgaaacctggagcccctcaacccaaggcaaatcaacaacatcaagacaacgctcgaggtcttgtgcttccgggttacaaataccttggacccggcaacggactcgacaagggggagccggtcaacgcagcagacgcggcggccctcgagcacgacaaggcctacgaccagcagctcaaggccggagacaacccgtacctcaagtacaaccacgccgacgccgagttccaggagcggctcaaagaagatacgtcttttgggggcaacctcgggcgagcagtcttccaggccaaaaagaggcttcttgaacctcttggtctggttgaggaagcggctaagacggctcctggaaagaagaggcctgtagagcagtctcctcaggaaccggactcctccgcgggtattggcaaatcgggtgcacagcccgctaaaaagagactcaatttcggtcagactggcgacacagagtcagtcccagaccctcaaccaatcggagaacctcccgcagccccctcaggtgtgggatctcttacaatggcttcaggtggtggcgcaccagtggcggacaataacgaaggtgccgatggagtgggtagttcctcgggaaattggcattgcgattcccaatggctgggggacagagtcatcaccaccagcacccgaacctgggccctgcccacctacaacaatcacctctacaagcaaatctccaacagcacatctggaggatcttcaaatgacaacgcctacttcggctacagcaccccctgggggtattttgacttcaacagattccactgccacttctcaccacgtgactggcagcgactcatcaacaacaactggggattccggcctaagcgactcaacttcaagctcttcaacattcaggtcaaagaggttacggacaacaatggagtcaagaccatcgccaataaccttaccagcacggtccaggtcttcacggactcagactatcagctcccgtacgtgctcgggtcggctcacgagggctgcctcccgccgttcccagcggacgttttcatgattcctcagtacgggtatctgacgcttaatgatggaagccaggccgtgggtcgttcgtccttttactgcctggaatatttcccgtcgcaaatgctaagaacgggtaacaacttccagttcagctacgagtttgagaacgtacctttccatagcagctacgctcacagccaaagcctggaccgactaatgaatccactcatcgaccaatacttgtactatctctcaaagactattaacggttctggacagaatcaacaaacgctaaaattcagtgtggccggacccagcaacatggctgtccagggaagaaactacatacctggacccagctaccgacaacaacgtgtctcaaccactgtgactcaaaacaacaacagcgaatttgcttggcctggagcttcttcttgggctctcaatggacgtaatagtttgatgaatcctggacctgctatggccagccacaaagaaggagaggaccgtttctttcctttgtctggatctttaatttttggcaaacaaggaactggaagagacaacgtggatgcggacaaagtcatgataaccaacgaagaagaaattaaaactactaacccggtagcaacggagtcctatggacaagtggccacaaaccaccagagtgcccaagcacaggcgcagaccggctgggttcaaaaccaaggaatacttccgggtatggtttggcaggacagagatgtgtacctgcaaggacccatttgggccaaaattcctcacacggacggcaactttcacccttctccgctgatgggagggtttggagtgaagcacccgcctcctcagatcctcatcaaaaacacacctgtacctgcggatcctccaacggccttcaacaaggacaagctgaactctttcatcacccagtattctactggccaagtcagcgtggagatcgagtgggagctgcagaaggaaaacagcaagcgctggaacccggagatccagtacacttccaactattacaagtctaataatgttgaatttgctgttaatactgaaggtgtatatagtgaaccccgccccattggcaccagatacctgactcgtaatctg

SEQ ID NO: 650 - DNA, 2208 bp, Artificial Sequence
  source: /note="Description of Artificial Sequence: Synthetic polynucleotide"
atggctgccgatggttatcttccagattggctcgaggacaaccttagtgaaggaattcgcgagtggtgggctttgaaacctggagcccctcaacccaaggcaaatcaacaacatcaagacaacgctcgaggtcttgtgcttccgggttacaaataccttggacccggcaacggactcgacaagggggagccggtcaacgcagcagacgcggcggccctcgagcacgacaaggcctacgaccagcagctcaaggccggagacaacccgtacctcaagtacaaccacgccgacgccgagttccaggagcggctcaaagaagatacgtcttttgggggcaacctcgggcgagcagtcttccaggccaaaaagaggcttcttgaacctcttggtctggttgaggaagcggctaagacggctcctggaaagaagaggcctgtagagcagtctcctcaggaaccggactcctccgcgggtattggcaaatcgggtgcacagcccgctaaaaagagactcaatttcggtcagactggcgacacagagtcagtcccagaccctcaaccaatcggagaacctcccgcagccccctcaggtgtgggatctcttacaatggcttcaggtggtggcgcaccagtggcagacaataacgaaggtgccgatggagtgggtagttcctcgggaaattggcattgcgattcccaatggctgggggacagagtcatcaccaccagcacccgaacctgggccctgcccacttacaacaatcacctctacaagcaaatctccaacagcacatctggaggatcttcaaatgacaacgcctacttcggctacagcaccccctgggggtattttgacttcaacagattccactgccacttctcaccacgtgactggcagcgactcaccaacaacaactggggattccggcctaagcgactcaacttcaagctcttcaacattcaggtcaaagaggttacggacaacaatggagtcaagaccatcgccaataaccttaccagcacggtccaggtcttcacggactcagactatcagctcccgtacgtgctcgggtcggctcacgagggctgcctcccgccgttcccagcggacgttttcatgattcctcagtacgggtatctgacgcttaatgatggaagccaggccgtgggtcgttcgtccttttactgcctggaatatatcccgtcgcaaatgctaagaacgggtaacaacttccagttcagctacgagtttgagaacgtacctttccatagcagctacgctcacagccaaagcctggaccgactaatgaatccactcatcgaccaatacttgtactatctctcaaagactattaacggttctggacagaatcaacaaacgctaaaattcagtgtggccggacccagcaacatggctgtccagggaagaaactacatacctggacccagctaccgacaacaacgtgtctcaaccactgtgactcaaaacaacaacagcgaatttgcttggcctggagcttcttcttgggctctcaatggacgtaatagcttgatgaatcctggacctgctatggccagccacaaagaaggagaggaccgtttctttcctttgtctggatctttaatttttggcaaacaaggaactggaagagacaacgtggatgcggacaaagtcatgataaccaacgaagaagaaattaaaactactaacccggtagcaacggagtcctatggacaagtggccacaaaccaccagagtgcccaagcacaggcgcagaccggctgggttcaaaaccaaggaatacttccgggtatggtttggcaggacagagatgtgtacctgcaaggacccatttgggccaaaattcctcacacggacggcaactttcacccttctccgctgatgggagggtttggagtgaagcacccgcctcctcagatcctcatcaaaaacacacctgtacctgcggatcctccaacggccttcaacaaggacaagctgaactctttcatcacccagtattctactggccaagtcagcgtggagatcgagtgggagctgcagaaggaaaacagcaagcgctggaacccggagatccagtacacttccaactattacaagtctaataatgttgaatttgctgttaatactgaaggtgtatatagtgaaccccgccccattggcaccagatacctgactcgtaatctg

SEQ ID NO: 651 - DNA, 2208 bp, Artificial Sequence
  source: /note="Description of Artificial Sequence: Synthetic polynucleotide"
atggctgccgatggttatcttccagattggctcgaggacaaccttagtgaaggaattcgcgagtggtgggctttgaaacctggagcccctcaacccaaggcaaatcaacaacatcaagacaacgctcgaggtcttgtgcttccgggttacaaataccttggacccggcaacggactcgacaagggggagccggtcaacgcagcagacgcggcggccctcgagcacgacaaggcctacgaccagcagctcaaggccggagacaacccgtacctcaagtacaaccacgccgacgccgagttccaggagcggctcaaagaagatacgtcttttgggggcaacctcgggcgagcagtcttccaggccaaaaagaggcttcttgaacctcttggtctggttgaggaagcggctaagacggctcctggaaagaagaggcctgtagagcagtctcctcaggaaccggactcctccgcgggtattggcaaatcgggtgcacagcccgctaaaaagagactcaatttcggtcagactggcgacacagagtcagtcccagaccctcaaccaatcggagaacctcccgcagccccctcaggtgtgggatctcttacaatggcttcaggtggtggcgcaccagtggcagacaataacgaaggtgccgatggagtgggtagttcctcgggaaattggcattgcgattcccaatggctgggggacagagtcatcaccaccagcacccgaacctgggccctgcccacctacaacaatcacctctacaagcaaatctccaacagcacatctggaggatcttcaaatgacaacgcctacttcggctacagcaccccctgggggtattttgacttcaacagattccactgccacttctcaccacgtgactggcagcgactcatcaacaacaactggggattccggcctaagcgactcaacttcaagctcttcaacattcaggtcaaagaggttacggacaacaatggagtcaagaccatcgccaataaccttaccagcacggtccaggtcttcacggactcagactatcagctcccgtacgtgctcgggtcggctcacgagggctgcctcccgccgttcccagcggacgttttcatgattcctcagtacgggtatctgacgcttaatgatggaagccaggccgtgggtcgttcgtccttttactgcctggaatatttcccgtcgcaaatgctaagaacgggtaacaacttccagtttagctacgagtttgagaacgtacctttccatagcagctacgctcacagccaaagcctggaccgactaatgaatccactcatcgaccaatacttgtactatctctcaaagactattaacggttctggacagaatcaacaaacgctaaaattcagtgtggccggacccagcaacatggctgtccagggaagaaactacatacctggacccagctaccgacaacaacgtgtctcaaccactgtgactcaaaacaacaacagcgaatttgcttggcctggagcttcttcttgggctctcaatggacgtaatagcttgatgaatcctggacctgctatggccagccacaaagaaggagaggaccgtttctttcctttgtctggatctttaatttctggcaaacaaggaactggaagagacaacgtggatgcgaacaaagtcatgataaccaacgaagaagaaattaaaactactaacccggtagcaacggagtcctatggacaagtggccacaaaccaccagagtgcccaagcacaggcgcagaccggctgggttcaaaaccaaggaatacttccgggtatggtttggcaggacagagatgtgtacctgcaaggacccatttgggccaaaattcctcacacggacggcaactttcacccttctccgctgatgggagggtttgaaatgaagcacccgcctcctcagatcctcatcaaaaacacacctgtacctgcggatcctccaacggccttcaacaaggacaagctgaactctttcatcacccagtattctactggccaagtcagcgtggagatcgagtgggagctgcagaaggaaaacagcaagcgctggaacccggagatccagtacacttccaactattacaagtctaataatgttgaatttgctgttaatactgaaggtgtatatagtgaaccccgccccattggcaccagatacctgactcgtaatctg

SEQ ID NO: 652 - DNA, 2208 bp, Artificial Sequence
  source: /note="Description of Artificial Sequence: Synthetic polynucleotide"
atggctgccgatggttatcttccagattggctcgaggacaaccttagtgaaggaattcgcgagtggtgggctttgaaacctggagcccctcaacccaaggcaaatcaacaacatcaagacaacgctcgaggtcttgtgcttccgggttacaaataccttggacccggcaacggactcgacaagggggagccggtcaacgcagcagacgcggcggccctcgagcacgacaaggcctacgaccagcagctcaaggccggagacaacccgtacctcaagtacaaccacgccgacgccgagttccaggagcggctcaaagaagatacgtcttttgggggcaacctcgggcgagcagtcttccaggccaaaaagaggcttcttgaacctcttggtctggttgaggaagcggctaagacggctcctggaaagaagaggcctgtagagcagtctcctcaggaaccggactcctccgcgggtattggcaaatcgggtgcacagcccgctaaaaagagactcaatttcggtcagactggcgacacagagtcagtcccagaccctcaaccaatcggagaacctcccgcagccccctcaggtgtgggatctcttacaatagcttcaggtggtggcgcaccagtggcagacaataacgaaggtgccgatggagtgggtagttcctcgggaaattggcattgcgattcccaatggctgggggacagagtcatcaccaccagcacccgaacctgggccctgcccacctacaacaatcacctctacaagcgaatctccaacagcacatctggaggatcttcaaatgacaacgcctacttcggctacagcaccccctgggggtattttgacttcaacagattccactgccacttctcaccacgtgactggcagcgactcatcaacaacaactggggattccggcctaagcgactcaacttcaagcttttcaacattcgggtcaaagaggttacggacaacaatggagtcaagaccatcaccaataaccttaccagcacggtccaggtcttcacggactcagactatcagctcccgtacgtgcttgggtcggctcacgagggctgcctcccgccgttcccagcggacgttttcatgattcctcagtacgggtatctgacgcttaatgatggaagccaggccgtgggtcgttcgtccttttactgcctggaatatttcccgtcgcaaatgctaagaacgggtaacaacttccagttcagctacgagtttgagaacgtacctttccatagcagctacgctcacagccaaagcctggaccgactaatgaatccactcatcgaccaatacttgtactatctctcaaagactattaacggttctggacagaatcaacaaacgctaaaattcagtgtggccggacccagcaacatggctgtccagggaagaaactacatacctggacccagctaccgacaacaacgtgtctcaaccactgtgactcgaaacaacaacagcgaatttgcttggcctggagcttcttcttgggctctcaatggacgtaatagcttgatgaatcctggacctgctatggccagccacaaagaaggagaggaccgtttctttcctttgtctggatctttaatttttggcaaacaaggaactggaagagacaacgtggatgcggacaaagtcatgataaccaacgaagaagaaattaaaactactaacccggtagcaacggagtcctatggacaagtggccacaaaccaccagagtgcccaagcacaggcgcagaccggctgggttcaaaaccaaggaatacttccgggtatggtttggcaggacagagatgtgtacctgcaaggacccatttgggccaaaattcctcacacggacggcaactttcacccttctccgctgatgggagggtttggagtgaagcacccgcctcctcagatcctcatcaaaaacacacctgtacctgcggatcctccaacggccttcaacaaggacaagctgaactctttcatcacccagtattctactggccaagtcagcgtggagatcgagtgggagctgcagaaggaaaacagcaagcgctggaacccggagatccagtacacttccaactattacaagtctaataatgttgaatttgctgttaatactgaaggtgtatatagtgaaccccgccccattggcaccagatacctgactcgtaatctg

SEQ ID NO: 653 - DNA, 2208 bp, Artificial Sequence
  source: /note="Description of Artificial Sequence: Synthetic polynucleotide"
atggctgccgatggttatcttccagattggctcgaggacaaccttagtgaaggaattcgcgagtggtgggctttgaaacctggagcccctcaacccaaggcaaatcaacaacatcaagacaacgctcgaggtcttgtgcttccgggttacaaataccttggacccggcaacggactcgacaagggggagccggtcaacgcagcagacgcggcggccctcgagcacgacaaggcctacgaccagcagctcaaggccggagacaacccgtacctcaagtacaaccacgccgacgccgagttccaggagcggctcaaagaagatacgtcttttgggggcaacctcgggcgagcagtcttccaggccaaaaagaggcttcttgaacctcttggtctggttgaggaagcggctaagacggctcctggaaagaagaggcctgtagagcagtctcctcaggaaccggactcctccgcgggtattggcaaatcgggcgcacagcccgctaaaaagagactcaatttcggtcagactggcgacacagagccagtcccagaccctcaaccaatcggagaacctcccgcagccccctcaggtgtgggatctcttacaatggcttcaggtggtggcgcaccagtggcagacaataacgaaggtgccgatggagtgggtagttcctcgggaaattggcattgcgattcccaatggctgggggacagagtcatcaccaccagcacccgaacctgggccctgcccacctacaacaatcacctctacaagcaaatctccaacagcacatctggaggatcttcaaatgacaacgcctacttcggctacagcaccccctgggggtattttgacttcaacagattccactgccacttctcaccacgtgactggcagcgactcatcaacaacaactggggattccggcctaagcgactcaacttcaagctcttcaacattcaggtcaaagaggttacggacaacaatggagtcaagaccatcgccaataaccttaccagcacggtccaggtcttcacggactcagactatcagctcccgtacgtgctcgggtcggctcacgagggctgcctcccgccgttcccagcgggcgttttcatgattcctcagtacgggtatctgacgcttaatgatggaagccaggccgtgggtcgttcgtccttttactgcctggaatatttcccgtcgcaaatgctaagaacgggtaacaacttccagttcagctacgagtttgagaacgtacctttccatagcagctacgctcacagccaaagcctggaccgactaatgaatccactcatcgaccaatacttgtactatctctcaaagactattaacggttctggacagaatcaacaaacgctaaaattcagtgtggccggacccagcaacatggctgtccagggaagaaactacatacctggacccagctaccgacaacaacgtgtctcaaccactgcgactcaaaacaacaacagcgaatttgcttggcctggagcttcttcttgggctctcaatggacgtaatagcttgatgaatcctggacctgctatggccagccacaaagaaggagaggaccgtttctttcctttgtctggatctttaatttttggcaaacaaggaactggaagagacaacgtggatgcggacaaagtcatgataaccaacgaagaagaaattaaaactactaacccggtagcaacggagtcctatggacaagtggccacaaaccaccagagtgcccaagcacaggcgcagaccggctgggttcaaaaccaaggaatacttccgggtatggtttggcaggacagagatgtgtacctgcaaggacccatttgggccaaaattcctcacacggacggcaactttcacccttctccgctgatgggagggtttggaatgaagcacccgcctcctcagatcctcatcaaaaacacacctgtacctgcggatcctccaacggccttcaacaaggacaagctgaactctttcatcacccagtattctactggccaagtcagcgtggagatcgagtgggagctgcagaaggaaaacagcaagcgctggaacccggagatccagtacacttccaactattacaagtctaataatgttgaatttgctgttaatactgaaggtgtatatagtgaaccccgccccattggcaccagatacctgactcgtaatctg

SEQ ID NO: 654 - DNA, 2208 bp, Artificial Sequence
  source: /note="Description of Artificial Sequence: Synthetic polynucleotide"
atggctgccgatggttatcttccagattggctcgaggacaaccttagtgaaggaattcgcgagtggtgggctttgaaacctggagcccctcaacccaaggcaaatcaacaacatcaagacaacgctcgaggtcttgtgcttccgggttacaaataccttggacccggcaacggactcgacaagggggagccggtcaacgcagcagacgcggcggccctcgagcacgacaaggcctacgaccagcagctcaaggccggagacaacccgtacctcaagtacaaccacgccgacgccgggttccaggagcggctcaaagaagatacgtcttttgggggcaacctcgggcgagcagtcttccaggccaaaaagaggcttcttgaacctcttggtctggttgaggaagcggctaagacggctcctggaaagaagaggcctgtagagcagtctcctcaggaaccggactcctccgcgggtattggcaaatcgggtgcacagcccgctaaaaagagactcaatttcggtcagactggcgacacagagtcagtcccagtccctcaaccaatcggagaacctcccgcagccccctcaggtgtgggatctcttacaatggcttcaggtggtggcgcaccagtggcagacaataacgaaggtgccgatggagtgggtagttcctcgggaaattggcattgcgattcccaatggctgggggacagagtcatcaccaccagcacccgaacctgggccctgcccacctacaacaatcacctctacaagcaaatctccaacagcacatctggaggatcttcaaatgacaacgcctacttcggctacagcaccccctgggggtattttgacttcaacagattccactgccacttctcaccacgtgactggcagcgactcatcaacaacaactggggattccggcctaagcgactcaacttcaagctcttcaacattcaggtcaaagaggttacggacaacaatggagtcaagaccatcgccaataaccttaccagcacggtccaggtcttcacggactcagactatcagctcccgtacgtgctcgggtcggctcacgagggctgcctcccgccgttcccagcggacgttttcatgattcctcagtacgggtatctgacgcttaatgatggaagccaggccgtgggtcgttcgtccttttactgcctggaatatttcccgtcgcaaatgctaagaacgggtaacaacttccagttcagctacgagtttgagaacgtacctttccatagcagctacgctcacagccaaagcctggaccgactaatgaatccactcatcgaccaatacttgtactatctctcaaagactattaacggttctggacagaatcaacaaacgctaaaattcagtgtggccggacccagcaacatggctgtccagggaagaaactacatacctggacccagctaccgacaacaacgtgtctcaaccactgtgactcaaaacaacaacagcgaatttgcttggcctggagcttcttcttgggctctcaatggacgtaatagcttgatgaatcctggacctgctatggccagccacaaagaaggagaggaccgtttctttcctttgtctggatctttaatttttggcaaacaaggagctggaagagacaacgtggatgcggacaaagtcatgataaccaacgaagaagaaattaaaactactaacccggtagcaacggagtcctatggacaagtggccacaaaccaccagagtgcccaagcacaggcgcagaccggctgggttcaaaaccaaggaatacttccgggtatggtttggcaggacagagatgtgtacctgcaaggacccatttgggccaaaattcctcacacggacggcaactttcacccttctccgctgatgggagggtttggaatgaagcacccgcctcctcagatcctcatcaaaaacacacctgtacctgcggatcctccaacggccttcaacaaggacaagctgaactctttcatcacccagtattctactggccaagtcagcgtggagatcgagtgggagctgcagaaggaaaacagcaagcgctggaacccggagatccagtacacttccaactattacaagtctaataatgttgaatttgctgttaatactgaaggtgtatatagtgaaccccgccccattggcaccagatacctgactcgtaatctg

SEQ ID NO: 655 - DNA, 2208 bp, Artificial Sequence
  source: /note="Description of Artificial Sequence: Synthetic polynucleotide"
  modified_base (377)..(377): a, c, t, or g
atggctgccgatggttatcttccagattggctcgaggacaaccttagtgaaggaattcgcgagaggtgggctttgaaacctggagcccctcaacccaaggcaaatcaacaacatcaagacaacgctcgaggtcttgtgcttccgggttacaaataccttggacccggcaacggactcgacaagggggagccggtcaacgcagcagacgcggcggccctcgagcacgacaaggcctacgaccagcagctcaaggccggagacaacccgtacctcaagtacaaccacgccgacgccgagttccaggagcggctcaaagaagatacgtcttttgggggcaacctcgggcgagcagtcttccaggccaaaaagaggcttcntgaacctcttggtctggttgaggaagcggctaagacggctcctggaaagaagaggcctgtagagcagtctcctcaggaaccggactcctccgcgggtattggcaaatcgggtgcacagcccgctaaaaagagactcaatttcggtcagactggcgacacagagtcagtcccagaccctcaaccaatcggagaacctcccgcagccccctcaggtgtgggatctcttacaatggcttcaggtggtggcgcaccagtggcagacaataacgaaggtgccgatggagtgggtagttcctcggggaattggcattgcgattcccaatggctgggggacagagtcatcaccaccagcacccgaacctgggccctgcccacctacaacaatcacctctacaagcaaatctccaacagcacatctggaggatcttcaaatgacaacgcctacttcggctacagcaccccctgggggtattttgacttcaacagattccactgccacttctcaccacgtgactggcagcgactcatcaacaacaactggggattccggcctaagcgactcaacttcaagctcttcaacattcaggtcaaagaggttacggacaacaatggagtcaagaccatcgccaataaccttaccagcacggtccaggtcttcacggactcagactatcagctcccgtacgtgctcgggtcggctcacgagggctgcctcccgccgttcccagcggacgttttcatgattcctcagtacgggtatctgacgcttaatgatggaagccaggccgtgggtcgttcgtccttttactgcctggaatatttcccgtcgcaaatgctaagaacgggtaacaacttccagttcagctacgagtttgagaacgtacctttccatagcagctacgctcacagccaaagcccggaccgactaatgaatccactcatcgaccaatacttgtactatctctcaaagactattaacggttctggacagaatcaacaaacgctaaaattcagtgtggccggacccagcaacatggctgtccagggaagaaactacatacctggacccagctaccgacaacaacgtgtctcaaccactgtgactcaaaacaacaacagcgaatttgcttggcctggagcttcttcttgggctctcaatggacgtaatagcttgatgaatcctggacctgctatggccagccacaaagaaggagaggaccgtttctttcctttgtctggatctttaatttttggcaaacaaggaactggaagagacaacgtggatgcggacaaagtcatgataaccaacgaagaagaaattaaaactactaacccggtagcaacggagtcctatggacaagtggccacaaaccaccagagtgcccaagcacaggcgcagaccggctgggttcaaaaccaaggaatacttccgggtatggtttggcaggacagagatgtgtacctgcaaggacccatttgggccaaaattcctcacacggacggcaactttcacccttctccgctgatgggagggtttggagtgaagcacccgcctcctcagatcctcatcaaaaacacacctgtacctgcggatcctccaacggccttcaacaaggacaagctgaactctttcatcacccagtattctactggccaagtcagcgtggagatcgagtgggagctgcagaaggaaaacagcaagcgctggaacccggagatccagtacacttccaactattacaagtctaataatgttgaatttgctgttaatactgaaggtgtatatagtgaaccccgccccattggcaccagatacctgactcgtaatctg

SEQ ID NO: 656 - DNA, 2208 bp, Artificial Sequence
  source: /note="Description of Artificial Sequence: Synthetic polynucleotide"
atggctgccgatggttatcttccagattggctcgaggacaaccttagtgaaggaattcgcgagtggtgggctttgaaacctggagcccctcaacccaaggcaaatcaacaacatcaagacaacgctcgaggtcttgtgcttccgggttacaaataccttggacccggcaacggactcgacaagggggagccggtcaacgcagcagacgcggcggccctcgagcacgacaaggcctacgaccagcagctcaaggccggagacaacccgtacctcaagtacaaccacgccgacgccgagttccaggagcggctcaaagaagatacgtcttttgggggcaacctcgggcgagcagtcttccaggccaaaaagaggcttcttgaacctcttggtctggttgaggaagcggctaagacggctcctggaaagaagaggcctgtagagcagtctcctcaggaaccggactcctccgcgggtattggcaaatcgggtgcacagcccgctaaaaagagactcaatttcggtcagactggcgacacagagtcagtcccagaccctcaaccaatcggagaacctcccgcagccccctcaggtgtgggatctcttacaatggcttcaggtggtggcgcaccagtggcagacaataacgaaggtgccgatggagtgggtagttcctcgggaaattggcattgcgattcccaatggctgggggacagagtcatcaccaccagcacccgaacctgggccctgcccacctacaacaatcacctctacaagcaaatctccaacagcacatctggaggatcttcaaatgacaacgcctacctcggctacagcaccccctgggggtattttgacttcaacagattccactgccacttctcaccacgtgactggcagcgactcatcaacaacaactggggattccggcctaagcgactcaacttcaagctcttcaacattcaggtcaaagaggttacggacaacaatggagtcaagaccatcgccaataaccttaccagcacggtccaggtcttcacggactcagactatcagctcccgtacgtgctcgggtcggctcacgagggctgcctcccgccgttcccagcggacgttttcatgattcctcagtacgggtatctgacgcttaatgatggaagccaggccgtgggtcgttcgtccttttactgcctggaatatttcccgtcgcaaatgctaagaacgggtaacaacttccagttcagctacgagtttgagaacgtacctttccatagcagctacgctcacagccaaagcctggaccgactaatgaatccactcatcgaccaatacttgtactatctctcaaagactattaacggttctggacagaatcaacaaacgctaaaattcagtgtggccggacccagcaacatggctgtccagggaagaaactacatacctggacccagctaccgacaacaacgtgtctcaaccactgtgactcaaaacaacaacagcgaatttgcttggcctggagcttcttcttgggctctcaatggacgtaatagcttgatgaatcctggacctgctatggccagccacaaagaaggagaggaccgtttctttcctttgtctggatctttaatttttggcaaacaaggaactggaagagacaacgtggatgcggacaaagtcatgataaccaacgaagaagaaattaaaactactaacccggtagcaacggagtcctatggacaagtggccacaaaccaccagagtgcccaagcacaggcgcagaccggctgggttcaaaaccaaggaatacttccgggtatggtttggcaggacagagatgtgtacctgcaaggacccatttgggccaaaattcctcacacggacggcaactttcacccttctccgctgatgggagggtttggaatgaagcacccgcctcctcagatcctcatcaaaaacacacctgtacctgcggatcctccaacggccttcaacaaggacaagctgaactctttcatcacccagtattctactggccaagtcagcgtggagatcgagtgggagctgcagaaggaaaacagcaagcgctggaacccggagatccagtacacttccaactattacaagtctaataatgttgaatttgctgttaatactgaaggtgtatatagtgaaccccgccccattggcaccagatacctgactcgtaatctg

SEQ ID NO: 657 - DNA, 2208 bp, Artificial Sequence
  source: /note="Description of Artificial Sequence: Synthetic polynucleotide"
atggctgccgatggttatcttccagattggctcgaggacaaccttagtgaaggaattcgcgagtggtgggctttgaaacctggagcccctcaacccaaggcaaatcaacaacatcaagacaacgctcgaggtcttgtgcttccgggttacaaataccttggacccggcaacggactcgacaagggggagccggtcaacgcagcagacgcggcggccctcgagcacgacaaggcctacgaccagcagctcaaggccggagacaacccgtacctcaagtacaaccacgccgacgccgagttccaggagcggctcaaagaagatacgtcttttgggggcaacctcgggcgagcagtcttccaggccaaaaagaggcttcttgaacctcttggtctggttgaggaagcggctaagacggctcctggaaagaagaggcctgtagagcagtctcctcaggaaccggactcctccgcgggtattggcaaatcgggtgcacagcccgctaaaaagagactcaatttcggtcagactggcgacacagagtcagtcccagaccctcaaccaatcggagaacctcccgcagccccctcaggtgtgggatctcttacaatggcttcaggtggtggcgcaccagtggcagacaataacgaaggtgccgatggagtgggtagttcctcgggaaattggcattgcgattcccaatggctgggggacagagtcatcaccaccagcacccgaacctgggccctgcccacctacaacaatcacctctacaagcaaatctccaacagcacatctggaggatcttcaaatgacaacgcctacttcggctacagcaccccctgggggtattttgacttcaacagattccactgccacttctcaccacgtgactggcagcgactcatcaacaacaactggggattccggcctaagcgactcaacttcaagctcttcaacattcaggtcaaagaggttacggacaacaatggagtcaagaccatcgccaataaccttaccagcacggtccaggtcttcacggactcagactatcagctcccgtacgtgctcgggtcggctcacgagggctgcctcccgccgttcccagcggacgttttcatgattcctcagtacgggtatctgacgcttaatgatggaagccaggccgtgggtcgttcgtccttttactgcctggaatatttcccgtcgcaaatgctaagaacgggtaacaacttccagttcagctacgagtttgagaacgtacctttccatagcagctacgctcacagccagagcctggaccgactaatgaatccactcatcgaccaatacttgtactatctctcaaagactattaacggttctggacagaatcaacaaacgctaaaattcagtgtggccggacccagcaacatggctgtccagggaagaaactacatacctggacccagctaccgacaacaacgtgtctcaaccactgtgactcaaaacaacaacagcgaatttgcttggcctggagcttcttcttgggctctcaatggacgtaatagcttgatgaatcctggacctgctatggccagccacaaagaaggagaggaccgtttctttcctttgtctggatctttaatttttggcaaacaaggaactggaagagacaacgtggatgcggacaaagtcatgataaccaacgaagaagaaattaaaactactaacccggtagcaacggagtcctatggacaagtggccacaaaccaccagagtgcccaagcacaggcgcagaccggctgggttcaaaaccaaggaatacttccgggtatggtttggcaggacagagatgtgtacctgcaaggacccatttgggccaaaattcctcacacggacggcaactttcacccttctccgctgatgggagggtttggaatgaagcacccgcctcctcagatcctcatcaaaaacacacctgtacctgcggatcctccaacggccttcaacaaggacaagctggactctttcatcacccagtattctactggccaagtcagcgtggagatcgagtgggagctgcagaaggaaaacagcaagcgctggaacccggtgatccagtacacttccaactattacaagtctaataatgttgaatttgctgttaatactgaaggtgtatatagtgaaccccgccccattggcaccagatacctgactcgtaatctg

SEQ ID NO: 658 - DNA, 2208 bp, Artificial Sequence
  source: /note="Description of Artificial Sequence: Synthetic polynucleotide"
atggctgccgatggttatcttccagattggctcgaggacaacctctctgagggcattcgcgagtggtgggacttgaaacctggagccccgaagcccaaagccaaccagcaaaagcaggacgacggccggggtctggtgcttcctggctacaagtacctcggacccttcaacggactcgacaagggggagcccgtcaacgcggcggacgcagcggccctcgagcacgacaaggcctacgaccagcagctcaaagcgggtgacaatccgtacctgcggtataaccacgccgacgccgagtttcaggagcgtctgcaagaagatacgtcttttgggggcaacctcgggcgagcagtcttccaggccaagaagcgggttctcgaacctctcggtctggttgaggaaggcgctaagacggctcctggaaagaaacgtccggtagagcagtcgccacaagagccagactcctcctcgggcatcggcaagacaggccagcagcccgctaaaaagagactcaattttggtcagactggcgactcagagtcagtccccgatccacaacctctcggagaacctccagcaacccccgctgctgtggggcctactacaatggcttcaggcggtggcgcaccaatggcagacaataacgaaggcgtcgacggagtgggtaatgcctcaggaaattggcattgcgattccacatggctgggcgacagagtcatcaccaccagcacccgcacctgggccttgcccacctacaataaccacctctacaagcaaatctccagtgcttcaacgggggccagcaacgacaaccactacttcggctacagcaccccctgggggtattttgatttcaacagattccactgccacttttcaccacgtgactggcagcgactcatcaacaacaattggggattccggcccaagagactcaacttcaaactcttcaacatccaagtcaaggaggtcacgacgaatgatggcgttacaaccatcgctaataaccttaccagcacggttcaagtcttctcggactcggagtaccagcttccgtacgtcctcggctctgcgcaccagggctgcctccctccgttcccggcggacgtgttcatgattccgcaatacggctacctgacgctcaacaatggcagccaagccgtgggacgttcatccttttactgcctggaatatttcccttctcagatgctgagaacgggcaacaactttaccttcagctacacctttgaggaagtgcctttccacagcagctacgcgcacagccagagcctggaccggctgatgaatcctctcatcgaccaatacctgtattacctgaacagaactcaaaatcagtccggaagtgcccaaaacaaggacttgctgtttagccgtgggtctccagctggcatgtctgttcagcccaaaaactggctacctggaccctgttatcggcagcagcgcgtttctaaaacaaaaacagacaacaacaacagcaattttacctggactggtgcttcaaaatataacctcaatgggcgtgaatccatcatcaaccctggcactgctatggcctcacacaaagacgacgaagacaagttctttcccatgagcggtgtcatgatttttggaaaagagagcgccggagcttcaaacactgcattggacaatgtcatgattacagacgaagaggaaattaaagccactaaccctgtggccaccgaaagatttgggaccgtggcagtcaatttccagagcagcagcacagaccctgcgaccggagatgtgcatgctatgggagcattacctggcatggtgtggcaagatagagacgtgtacctgcagggtcccatttgggccaaaattcctcacacagatggacactttcacccgtctcctcttatgggcggctttggactcaagaacccgcctcctcagatcctcatcaaaaacacgcctgttcctgcgaatcctccggcggagttttcagccacaaagcttgcttcattcatcacccaatactccacaggacaagtgagtgtggaaattgaatgggagctgcagaaagaaaacagcaagcgctggaatcccgaagtgcagtacacatccaattatgcaaaatctgccaacgttgattttactgtggacaacaatggactttatactgagcctcgccccattggcacccgttaccttacccgtcccctg

SEQ ID NO: 659 - DNA, 2208 bp, Artificial Sequence
  source: /note="Description of Artificial Sequence: Synthetic polynucleotide"
atggctgccgatggttatcttccagattggctcgaggacaacctctctgagggcattcgcgagtggtgggacttgaaacctggagccccgaagcccaaagccaaccagcaaaagcaggacgacggccggggtctggtgcttcctggctacaagtacctcggacccttcaacggactcgacaagggggagcccgtcaacgcggcggacgcagcggccctcgagcacgacaaggcctacgaccagcagctcaaagcgggtgacaatccgtacctgcggtataaccacgccgacgccgagtttcaggagcgtctgcaagaagatacgtcttttgggggcaacctcgggcgagcagtcttccaggccaagaagcgggttctcgaacctctcggtctggttgaggaaggcgctaagacggctcctggaaagagacgtccggtagagcagtcgccacaagagccagactcctcctcgggcatcggcaagacaggccagcagcccgctaaaaagagactcaattttggtcagactggcgactcagagtcagtccccgatccacaacctctcggagaacctccagcaacccccgctgctgtgggacctactacaatggcttcaggcggtggcgcaccaatggcagacaataacgaaggcgccgacggagtgggtaatgcctcaggaaattggcattgcgattccacatggctgggcgacagagtcatcaccaccagcacccgcacctgggccttgcccacctacaataaccacctctacaagcaaatctccagtgcttcaacgggggccagcaacgacaaccactacttcggctacagcaccccctgggggtattttgatttcaacagattccactgccacttttcaccacgtgactggcagcgactcatcaacaacaattggggattccggcccaagagactcaacttcaaactcttcaacatccaagtcaaggaggtcacgacgaatgatggcgtcacaaccatcgctaataaccttaccagcacggttcaagtcttctcggactcggagtaccagcttccgtacgtcctcggctctgcgcaccagggctgcctccctccgttcccggcggacgtgttcatgattccgcaatacggctacctgacgctcaacaatggcagccaagccgtgggacgttcatccttttactgcctggaatatttcccttctcagatgctgagaacgggcaacaactttaccttcagctacacctttgaggaagtgcctttccacagcagctacgcgcacagccagagcctggaccggctgatgaatcctctcatcgaccaatacctgtattacctgaacagaactcaaaatcagtccggaagtgcccaaaacaaggacttgctgtttagccgtgggtctccagctggcatgtctgttcagcccaaaaactggctacctggaccctgttatcggcagcagcgcgtttctaaaacaaaaacagacaacaacaacagcaattttacctggactggtgcttcaaaatataacctcaatgggcgtgaatccatcatcaaccctggcactgctatggcctcacacaaagacgacgaagacaagttctttcccatgagcggtgtcatgatttttggaaaagagagcgccggagcttcaaacactgcattggacaatgtcatgattacagacgaagaggaaattaaagccactaaccctgtggccaccgaaagatttgggaccgtggcagtcaatttccagagcagcagcacagaccctgcgaccggagatgtgcatgctatgggagcattacctggcatggtgtggcaagatagagacgtgtacctgcagggtcccatttgggccaaaattcctcacacagatggacactttcacccgtctcctcttatgggcggctttggactcaagaacccgcctcctcagatcctcatcaaaaacacgcctgttcctgcgaatcctccggcggagttttcagctacaaagtttgcttcgttcatcacccaatactccacaggacaagtgagtgtggaaattgaatgggagctgcagaaagaaaacagcaagcgctggaatcccgaagtgcagtacacatccaattatgcaaaatctgccaacgttgattttactgtggacaacaatggactttatactgagcctcgccccattggcacccgttaccttacccgtcccctg

SEQ ID NO: 660 - DNA, 2208 bp, Artificial Sequence
  source: /note="Description of Artificial Sequence: Synthetic polynucleotide"
atggctgccgatggttatcttccagattggctcgaggacaacctctctgagggcattcgcgagtggtgggacttgaaacctggagccccgaagcccaaagccaaccagcaaaagcaggacgacggccggggtctggtgcttcctggctacaagtacctcggacccttcaacggactcgacaagggggagcccgtcaacgcggcggacgcagcggccctcgagcacgacaaggcctacgaccagcagctcaaagcgggtgacaatccgtacccgcggtataaccacgccgacgccgagtttcaggagcgtctgcaagaagatacgtcttttgggggcaacctcgggcgagcagtcttccaggccaagaagcgggttctcgaacctctcggtctggttggggaaggcgctaagacggctcctggaaagaaacgtccggtagagcagtcgccacaagagccagactcctcctcgggcatcggcaagacaggccagcagcccgctaaaaagagactcaattttggtcagactggcgactcagagtcagtccccgatccacaacctctcggagaacctccagcaacccccgctgctgtgggacctactacaatggcttcaggcggtggcgcaccaatggcagacaataacgaaggcgccgacggagtgggtaatgcctcaggaaattggcattgcgattccacatggctgggcgacagagtcatcaccaccagcacccgcacctgggccttgcccacctacaataaccacctctacaagcaaatctccagtgcttcaacgggggccagcaacgacaaccactacttcggctacagcaccccctgggggtattttgatttcaacagattccactgccacttttcaccacgtgactggcagcgactcatcaacaacaattggggattccggcccaagagactcaacttcaaactcttcaacatccaagtcaaggaggtcacgacgaatgatggcgtcacaaccatcgctaataaccttaccagcacggttcaagtcttctcggactcggagtaccagcttccgtacgtcctcggctctgcgcaccagggctgcctccctccgttcccggcggacgtgttcatgattccgcaatacggctacctgacgctcaacaatggcagccaagccgtgggacgttcatccttttactgcctggaatatttcccttctcagatgctgagaacgggcaacaactttaccttcagctacacctttgaggaagtgcctttccacagcagctacgcgcacagccagagcctggaccggctgatgaatcctcccatcgaccaatacctgtattacctgaacagaactcaaaatcagtccggaagtgcccaaaacaaggacttgctgtttagccgtgggtctccagctggcatgtctgttcagcccaaaaactggctacctggaccctgttatcggcagcagcgcgtttctaaaacaaaaacagacaacaacaacagcaattttacctggactggtgcttcaaaatataacctcaatgggcgtgaatccatcatcaaccctggcactgctatggcctcacacaaagacgacgaagacaagttctttcccatgagcggtgtcatgatttttggaaaagagagcgccggagcttcaaacactgcattggacaatgtcatgattacagacgaagaggaaattaaagccactaaccctgtggccaccgaaagatttgggaccgtggcagtcaatttccagagcagcagcacagaccctgcgaccggagatgtgcatgctatgggagcattacctggcatggtgtggcaagatagagacgtgtacctgcagggtcccatttgggccaaaattcctcacacagatggacactttcacccgtctcctcttatgggcggctttggactcaagaacccgcctcctcagatcctcatcaaaaacacgcctgttcctgcgaatcctccggcggagttttcagctacaaagtttgcttcattcatcacccaatactccacaggacaagtgagtgtggaaattgaatgggagctgcagaaagaaaacagcaagcgctggaatcccgaagtgcagtacacatccaattatgcaaaatctgccaacgttgattttactgtggacaacaatggactttatactgagcctcgccccattggcacccgttaccttacccgtcccctg

SEQ ID NO: 661 - DNA, 2208 bp, Artificial Sequence
  source: /note="Description of Artificial Sequence: Synthetic polynucleotide"
atggctgccgatggttatcttccagattggctcgaggacaacctctctgagggcattcgcgagtggtgggacttgaaacctggagccccgaagcccaaagccaaccagcaaaagcaggacgacggccggggtctggtgcttcctggctacaagtacctcggacccttcaacggactcgacaagggggagcccgtcaacgcggcggacgcagcggccctcgagcacgacaaggcctacgaccagcagctcaaagcgggtgacaatccgtacctgcggtataaccacgccgacgccgagtttcaggagcgtctgcaagaagatacgtcttttgggggcaacctcgggcgagcagtcttccaggccaagaagcgggttctcgaacctctcggtctggttgaggaaggcgctaagacggctcctggaaagaaacgtccggtagagcagtcgccacaagagccagactcctcctcgggcatcggcaagacaggccagcagcccgctaaaaagagactcaattttggtcagactggcgactcagagtcagtccccgatccacgacctctcggagaacctccagcaacccccgctgctgtgggacctactacaatggcttcaggcggtggcgcaccaatggcagacaataacgaaggcgccgacggagtgggtaatgcctcaggaaattggcattgcgattccacatggctgggcgacagagtcatcaccaccagcacccgcacctgggccttgcccacctacaataaccacctctacaagcaaatctccagtgcttcaacgggggccagcaacgacaaccactacttcggctacagcaccccctgggggtattttgatttcaacagattccactgccacttttcaccacgcgactggcagcgactcatcaacaacaattggggattccggcccaagagactcaacttcaaactcttcaacatccaagtcaaggaggtcacgacgaatgatggcgtcacaaccatcgctaataaccttaccagcacggttcaagtcttctcggactcggagtaccagcttccgtacgtcctcggctctgcgcaccagggctgcctccctccgttcccggcggacgtgttcatgattccgcaatacggctacctgacgctcaacaatggcagccaagccgtgggacgttcatccttttactgcctggaatatttcccttctcagatgctgagaacgggcaacaactttaccttcagctacacctttgaggaagtgcctttccacagcagctacgcgcacagccagagcctggaccggctgatgaatcctctcatcgaccaatacctgtattacctgaacagaactcaaaatcagtccggaagtgcccaaaacaaggacttgctgtttagccgtgggcctccagctggcatgtctgttcagcccaaaaactggctacctggaccctgttatcggcagcagcgcgtttctaaaacaaaaacagacaacaacaacagcaattttacctggactggtgcttcaaaatataacctcaatgggcgtgaatccatcatcaaccctggcactgctatggcctcacacaaagacgacgaagacaagttctttcccatgagcggtgtcatgatttttggaaaagagagcgccggagcttcaaacactgcattggacaatgtcatgattacggacgaagaggaaattaaagccactaaccctgtggccaccgaaagatttgggaccgtggcagtcaatttccagagcagcagcacagaccctgcgaccggagatgtgcatgctatgggagcattacctggcatggtgtggcaagatagagacgtgtacctgcagggtcccatttgggccaaaattcctcacacagatggacactttcacccgtctcctcttatgggcggctttggactcaagaacccgcctcctcagatcctcatcaaaaacacgcctgttcctgcgaatcctccggcggagttttcagctacaaagtttgcttcattcatcacccaatactccacaggacaagtgagtgtggaaattgaatgggagctgcagaaagaaaacagcaagcgctggaatcccgaagtgcagtacacatccaattatgcaaaatctgccaacgttgattttactgtggacaacaatggactttatactgagcctcgccccattggcacccgttaccttacccgtcccctg

SEQ ID NO: 662 - DNA, 2208 bp, Artificial Sequence
  source: /note="Description of Artificial Sequence: Synthetic polynucleotide"
atggctgccgatggttatcttccagattggctcgaggacaacctctctgagggcattcgcgagtggtgggacttgaaacctggagccccgaagcccaaagccaaccagcaaaagcaggacgacggccggggtctggtgcttcctggctacaagtacctcggacccttcaacggactcgacaagggggagcccgtcaacgcggcggacgcagcggccctcgagcacgacaaggcctacgaccagcagctcaaagcgggtgacaatccgtacctgcggtataaccacgccgacgccgagtttcaggagcgtctgcaagaagatacgtcttttgggggcaacctcgggcgagcagtcttccaggccaagaagcgggttctcgaacctctcggtctggttgaggaaggcgctaagacggctcctggaaagaaacgtccggtagagcagtcgccacaagagccagactcctcctcgggcatcggcaagacaggccagcagcccgctaaaaagagactcaattttggtcagactggcggctcagagtcagtccccgatccacaacctctcggagaacctccagcaacccccgctgctgtgggacctactacaatggcttcaggcggtggcgcaccaatggcagacaataacgaaggcgccgacggagtgggtaatgcctcaggaaattggcattgcgattccacatggctgggcgacagagtcatcaccaccagcacccgcacctgggccttgcccacctacaataaccacctctacaagcaaatctccagtgcttcaacgggggccagcaacgacaaccactacttcggctacagcaccccctgggggtattttgatttcaacagattccactgccacttttcaccacgtgactggcagcgactcatcaacaacaattggggattccggcccaagagactcaacttcaaactcttcaacatccaagtcaaggaggtcacgacgaatgatggcgtcacaaccatcgctaataaccttaccagcacggttcaagtcttctcggactcggagtaccagcttccgtacgtcctcggctctgcgcaccagggctgcctccctccgttcccggcggacgtgttcatgattccgcaatacggctacctgacgctcaacaatggcagccaagccgtgggacgttcatccttttactgcctggaatatttcccttctcagatgctgagaacgggcaacaactttaccttcagctacacctttgaggaagtgcctttccacagcagctacgcgcacagccagagcctggaccggctgatgaatcctcccatcgaccaatacctgtattacctgaacagaactcaaaatcagtccgggagtgcccaaaacaaggacttgctgtttagccgtgggtctccagctggcatgtctgttcagcccaaaaactggctacctggaccctgttatcggcagcagcgcgtttctaaaacaaaaacagacaacaacaacagcaattttacctggactggtgcttcaaaatataacctcaatgggcgtgaatccatcatcaaccctggcactgctatggcctcacacaaagacgacgaagacaagttctttcccatgagcggtgtcatgatttttggaaaagagagcgccggagcttcaaacactgcattggacaatgtcatgattacagacgaagaggaaattaaagccactaaccctgtggccaccgaaagatttgggaccgtggcagtcaatttccagagcagcagcacagaccctgcgaccggagatgtgcatgctatgggagcattacctggcatggtgtggcaagatagagacgtgtacctgcagggtcccatttgggccaaaattcctcacacagatggacactttcacccgtctcctcttatgggcggctttggactcaagaacccgcctcctcagatcctcatcaaaaacacgcctgttcctgcgaatcctccggcggagttttcagctacaaagtttgcttcattcatcacccaatactccacaggacaagtgagtgtggaaattgaatgggagctgcagaaagaaaacagcaagcgctggaatcccgaagtgcagtacacatccaattatgcaaaatctgccaacgttgactttactgtggacaacaatggactttatactgagcctcgccccattggcacccgttaccttacccgtcccctg

SEQ ID NO: 663 - DNA, 2208 bp, Artificial Sequence
  source: /note="Description of Artificial Sequence: Synthetic polynucleotide"
atggctgccgatggttatcttccagattggctcgaggacaacctctctgagggcattcgcgagtggtgggacttgaaacctggagccccgaagcccaaagccaaccagcaaaagcaggacgacggccggggtctggtgcttcctggctacaagtacctcggacccttcaacggactcgacaagggggagcccgtcaacgcggcggacgcagcggccctcgagcacgacaaggcctacgaccagcagctcaaagcgggtgacaatccgtacctgcggtataaccacgccgacgccgagtttcaagagcgtctgcaagaagatacgtcttttgggggcaacctcgggcgagcagtcttccaggccaagaagcgggttctcgaacctctcggtctggttgaggaaggcgctaagacggctcctggaaagaaacgtccggtagagcagtcgccacaagagccagactcctcctcgggcatcggcaagacaggccagcagcccgctaaaaagagactcaattttggtcagactggcgactcagagtcagtccccgatccgcaacctctcggagaacctccagcaacccccgctgctgtgggacctactacaatggcttcaggcggtggcgcaccaatggcagacaataacgaaggcgccgacggagtgggtaatgcctcaggaaattggcattgcgattccacatggctgggcgacagagtcatcaccaccagcacccgcacctgggccttgcccacctacaataaccacctctacaagcaaatctccagtgcttcaacgggggccagcaacgacaaccactacttcggctacagcaccccctgggggtattttgatttcaacagattccactgccacttttcaccacgtgactggcagcgactcatcaacaacaattggggattccggcccaagagactcaacttcaaactcttcaacatccaagtcaaggaggtcacgacgaatgatggcgtcacaaccatcgctaataaccttaccagcacggttcaagtcttctcggactcggagtaccagcttccgtacgtcctcggctctgcgcaccagggctgcctccctccgttcccggcggacgtgttcatgattccgcaatacggctacctgacgctcaacaatggcagccaagccgtgggacgttcatccttttactgcctggaatatttcccttctcagatgctgagaacgggcaacaactttaccttcagctacacctttgaggaagtgcctttccacagcagctacgcgcacagccagagcctggaccggctgatgaatcctctcatcgaccaatacctgtattacctgaacagaactcaaaatcagtccggaagtgcccaaaacaaggacttgctgtttagccgtgggtctccagctggcatgtctgttcagcccaaaaactggctacctggaccctgttatcggcagcagcgcgtttctaaaacaaaaacagacaacaacaacagcaattttacctggactggtgcttcaaaatataacctcaatgggcgtgaatccatcatcaaccctggcactgctgtggcctcacacaaagacgacgaagacaagttctttcccatgagcggtgtcatgatttttggaaaagagagcgccggagcttcaaacactgcattggacaatgtcatgattacagacgaagaggaaattaaagccactaaccctgtggccaccgaaagatttgggaccgtggcagtcaatttccagagcagcagcacagaccctgcgaccggagatgtgcatgctatgggagcattacctggcatggtgtggcaagatagagacgtgtacctgcagggtcccatttgggccaaaattcctcacacagatggacactttcacccgtctcctcttatgggcggctttggactcaagaacccgcctcctcagatcctcatcaaaaacacgcctgttcctgcgaatcctccggcggagttttcagctacaaagtttgcttcattcatcacccaatactccacaggacaagtgagtgtggaaattgaatgggagctgcagaaagaaaacagcaagcgctggaatcccgaagtgcagtacacatccaattatgcaaaatctgccaacgttgattttactgtggacaacaatggactttatactgagcctcgccccattggcacccgttaccttacccgtcccctg

SEQ ID NO: 664 - DNA, 2208 bp, Artificial Sequence
  source: /note="Description of Artificial Sequence: Synthetic polynucleotide"
atggctgccgatggttatcttccagattggctcgaggacaacctctctgagggcattcgcgagtggtgggacttgaaacctggagccccgaagcccaaagccaaccagcaaaagcaggacgacggccggggtctggtgcttcctggctacaagtacctcggacccttcaacggactcgacaagggggagcccgtcaacgcggcggacgcagcggccctcgagcacgacaaggcctacgaccagcagctcaaagcgggtgacaatccgtacctgcggtataaccacgccgacgccgagtttcaggagcgtctgcaagaagatacgtcttttgggggcaacctcgggcgagcagtcttccaggccaagaagcgggttctcgaacctctcggtctggttgaggaaggcgctaagacggctcctggaaagaaacgtccggtagagcagtcgccacaagagccagactcctcctcgggcatcggcaagacaggccagcagcccgctaaaaagagactcaattttggtcagactggcgactcagagtcagtccccgatccacaacctctcggagaacctccagcaacccccgctgctgtgggacctactacaatggcttcaggcggtggcgcaccaatggcagacaataacgaaggcgccgacggagtgggtaatgcctcaggaaattggcattgcgattccacatggctgggcgacagagtcatcaccaccagcacccgcacctgggccttgcccacctacaataaccacctctacaagcaaatctccagtgcttcaacgggggccagcaacgacaaccactacttcggctacagcaccccctgggggtattttgatttcaacagattccactgccacttttcaccacgtgactggcagcaactcatcaacaacaattggggattccggcccaagagactcaacttcaaactcttcaacatccaagtcaaggaggtcacgacgaatgatggcgtcacaaccatcgctaataaccttaccagcacggttcaagtcttctcggactcggagtaccagcttccgtacgtcctcggctctgcgcaccagggctgcctccctccgttcccggcggacgtgttcatgattccgcaatacggctacctgacgctcaacaatggcagccaagccgtgggacgttcatccttttactgcctggaatatttcccttctcagatgctgagaacgggcaacaactttaccttcagctacacctttgaggaagtgcctttccacagcagctacgcgcacagccagagcctggaccggctgatgaatcctctcatcgaccaatacctgtattacctgaacagaactcaaaatcagtccggaagtgcccaaaacaaggacttgctgtttagccgtgggtctccagctggcatgtctgttcagcccaaaaactggctacctggaccctgttatcggcagcagcgcgtttctaaaacaaaaacagacaacaacaacagcaattttacctggactggtgcttcaaaatataacctcaatgggcgtgaatccatcatcaaccctggcactgctatggcctcacacaaagacgacgaagacaagttctttcccatgagcggtgtcatgatttttggaaaagagagcgccggagcttcaaacactgcattggacaatgtcatgattacagacgaagaggaaattaaagccactaaccctgtggccaccgaaagatttgggaccgtggcagtcaatttccagagcaccagcacagaccctgcgaccggagatgtgcatgctatgggagcattacctggcatggtgtggcaagatagagacgtgtacctgcagggtcccatttgggccaaaattcctcacacagatggacactttcacccgtctcctcttatgggcggctttggactcaagaacccgcctcctcagatcctcatcaaaaacacgcctgttcctgcgaatcctccggcggagttttcagctacaaagtttgcttcattcatcacccaatactccacaggacaagtgagtgtggaaattgaatgggagctgcagaaagaaaacagcaagcgctggaatcccgaagtgcagtacacatccaattatgcaaaatctgccgacgttgattttactgtggacaacaatggactttatactgagcctcgccccattggcacccgttaccttacccgtcccctg

SEQ ID NO: 665 - DNA, 2208 bp, Artificial Sequence
  source: /note="Description of Artificial Sequence: Synthetic polynucleotide"
atggctgccgatggttatcttccagattggctcgaggacaacctctctgagggcattcgcgagtggtgggacttgaaacctggagccccgaagcccaaagccaaccagcaaaagcaggacgacggccggggtctggtgcttcctggctacaagtacctcggacccttcaacggactcgacaagggggagcccgtcaacgcggcggacgcagcggccctcgagcacgacaaggcctacgaccagcagctcaaagcgggtgacaatccgtacctgcggtataaccacgccgacgccgagtttcaagagcgtctgcaagaagatacgtcttttgggggcaacctcgggcgagcagtcttccaggccaagaagcgggttctcgaacctctcggtctggttgaggaaggcgctaagacggctcctggaaagaaacgtccggtagagcagtcgccacaagagccagactcctcctcgggcatcggcaagacaggccagcagcccgctaaaaagagactcaattttggtcagactggcgactcagagtcagtccccgatccgcaacctctcggagaacctccagcaacccccgctgctgtgggacctactacaatggcttcaggcggtggcgcaccaatggcagacaataacgaaggcgccgacggagtgggtaatgcctcaggaaattggcattgcgattccacatggctgggcgacagagtcatcaccaccagcacccgcacctgggccttgcccacctacaataaccacctctacaagcaaatctccagtgcttcaacgggggccagcaacgacaaccactacttcggctacagcaccccctgggggtattttgatttcaacagattccactgccacttttcaccacgtgactggcagcgactcatcaacaacaattggggattccggcccaagagactcaacttcaaactcttcaacatccaagtcaaggaggtcacgacgaatgatggcgtcacaaccatcgctaataaccttaccagcacggttcaagtcttctcggactcggagtaccagcctccgtacgtcctcggctctgcgcaccagggctgcctccctccgttcccggcggacgtgttcatgattccgcaatacggccacctgacgctcaacaatggcagccaagccgtgggacgttcatccttttactgcctggaatatttcccttctcagatgctgagaacgggcaacaactttaccttcagctacacctttgaggaagtgcctttccacagcagctacgcgcacagccagagcctggaccggctgacgaatcctctcatcgaccaatacctgtattacctgaacagaactcaaaatcagtccggaagtgcccaaaacaaggacttgctgtttagccgtgggtctccagctggcatgtctgttcagcccaaaaactggctacctggaccctgttatcggcagcagcgcgtttctaaaacaaaaacagacaacaacaacagcaattttacctggactggtgcttcaaaatataacctcaatgggcgtgaatccatcatcaaccctggcactgctatggcctcacacaaagacgacgaagacaagttctttcccatgagcggtgtcatgatttttggaaaagagagcgccggagcttcaaacactgcattggacaatgtcatgattacagacgaagaggaaattaaagccactaaccctgtggccaccgaaagatttgggaccgtggcagtcaatttccagagcagcagcacagaccctgcgaccggagatgtgcatgctatgggagcattacctggcatggtgtggcaagatagagacgtgtacctgcagggtcccatttgggccaaaattcctcacacagatggacactttcacccgtctcctcttatgggcggctttggactcaagaacccgcctcctcagatcctcatcaaaaacacgcctgttcctgcgaatcctccggcggagttttcagctacaaagtttgcttcattcatcacccaatactccacaggacaagtgagtgtggaaattgaatgggagctgcagaaagaaaacagcaagcgctggaatcccgaagtgcagtacacatccaattatgcaaaatctgccaacgttgattttactgtggacaacaatggactttatactgagcctcgccccattggcacccgttaccttacccgtcccctg

SEQ ID NO: 666 - DNA, 2208 bp, Artificial Sequence
  source: /note="Description of Artificial Sequence: Synthetic polynucleotide"
atggctgccgatggttatcttccagattggctcgaggacaacctctctgagggcattcgcgagtggtgggacttgaaacctggagccccgaagcccaaagccaaccagcaagagcaggacgacggccggggtctggtgcttcctggctacaagtacctcggacccttcaacggactcgacaagggggagcccgtcaacgcggcggacgcagcggccctcgagcacgacaaggcctacgaccagcagctcaaagcgggtgacaatccgtacctgcggtataaccacgccgacgccgagtttcaggagcgtctgcaagaagatacgtcttttgggggcaacctcgggcgagcagtcttccaggccaagaagcgggttctcgaacctctcggtctggttgaggaaggcgctaagacggctcctggaaagaaacgtccggtagagcagtcgccacaagagccagactcctcctcgggcatcggcaagacaggccagcagcccgctaaaaagagactcaattttggtcagactggcgactcagagtcagtccccgatccacaacctctcggagaacctccagcaacccccgctgctgtgggacctactacaatggcttcaggcggtggcgcaccaatggcagacaataacgaaggcgccgacggagtgggtaatgcctcaggaaattggcattgcgattccacatggctgggcgacagagtcatcaccaccagcacccgcacctgggccttgcccacctacaataaccacctctacaagcaaatctccagtgcttcaacgggggccagcaacgacaaccactacttcggctacagcaccccctgggggtattttgatttcaacagattccactgccacttttcaccacgtgactggcagcgactcatcaacaacaattggggattccggcccaagagactcaacttcaaactcttcaacatccaagtcaaggaggtcacgacgaatgatggcgtcacaaccatcgctaataaccttaccagcacggttcaagtcttctcggactcggagtaccagcttccgtacgtcctcggctctgcgcaccagggctgcctccctccgttcccggcggacgtgttcatgattccgcaatacggctacctgacgctcaacaatggcagccaagccgtgggacgttcatccttttactgcctggaatatttcccttctcagatgctgagaacgggcaacaactttaccttcagctacacctttgaggaagtgcctttccacagcagctacgcgcacagccagagcctggaccggctgatgaatcctctcatcgaccaatacctgtattacctgaacagaactcaaaatcagtccggaagtgcccaaaacaaggacttgctgtttagccgtgggtctccagctggcatgtctgttcagcccaaaaactggctacctggaccctgttatcggcagcagcgcgtttctaaaacaaaaacagacaacaacaacagcaattttacctggactggtgcttcaaaatataacctcaatgggcgtgaatccatcatcaaccctggcactgctatggcctcacacaaagacgacgaagacaagttctttcccatgagcggtgtcatgatttttggaaaagagagcgccggagcttcaaacactgcattggacaatgtcatgattacagacgaagaggaaattaaagccactaaccctgtggccaccgaaagatttgggaccgtggcagtcaatttccagagcagcagcacagaccctgcgaccggagatgtgcatgctacgggaacattacctggcatggtgtggcaagatagagacgtgtacctgcagggtcccatttgggccaaaattcctcacacagatggacactttcacccgtctcctcttatgggcggctttggactcaagaacccgcctcctcagatcctcatcaaaaccacgcctgttcctgcgaatcctccggcggagttttcagctacaaagtttgcttcattcatcacccagtactccacaggacaagtgagtgtggaaattgaatgggagctgcagaaagaaaacagcaagcgctggaatcccgaagtgcagtacacatccaattatgcaaaatctgccaacgttgattttactgtggacgacaatggactttatactgagcctcgccccattggcacccgttaccttacccgtcccctg

SEQ ID NO: 667 - DNA, 2208 bp, Artificial Sequence
  source: /note="Description of Artificial Sequence: Synthetic polynucleotide"
atggctgccgatggttatcttccagattggctcgaggacaacctctctgagggcattcgcgagtggtgggacttgaaacctggagccccgaagcccaaagccaaccagcaaaagcaggacgacggccggggtctggtgcttcctggctacaagtacctcggacccttcaacggactcgacaagggggagcccgtcaacgcggcggacgcagcggccctcgagcacgacaaggcctacgaccagcagctcaaagcgggtgacaatccgtacctgcggtataaccacgccgacgccgagtttcaggagcgtctgcaagaagatacgtcttttgggggcaacctcgggcgagcagtcttccaggccaagaagcgggttctcgaacctctcggtctggttgaggaaggcgctaagacggctcctggaaagaaacgtccggtagagcagtcgctacaagagccagactcctcctcgggcatcggcaagacaggccagcagcccgctaaaaagagactcaattttggtcagactggcgactcagagtcagtccccgatccacaacctctcggagaacctccagcaacccccgctgctgtgggacctactacaatggcttcaggcggtggcgcaccaatggcagacaataacgaaggcgccgacggagtgggtaatgcctcaggaaattggcattgcgattccacatggctgggcgacagagtcatcaccaccagcacccgcacctgggccttgcccacctacaataaccacctctacaagcaaatctccagtgcttcaacgggggccagcaacgacaaccactacttcggctacagcaccccctgggggtattttgatttcaacagattccactgccacttttcaccacgtgactggcagcgactcatcaacaacaattggggattccggcccaagagactcaacttcaaactcttcaacatccaagtcaaggaggtcacgacgaatgatggcgtcacaaccatcgctaataaccttaccagcacggttcaagtcttctcggactcggagtaccagcttccgtacgtcctcggctctgcgcaccagggctgcctccctccgttcccggcggacgtgttcatgattccgcaatacggctacctgacgctcaacaatggcagccaagccgtgggacgttcatccttttactgcctggaatatttcccttctcagatgctgagaacgggcaacaactttaccttcagctacacctttgaggaagtgcctttccacagcagctacgcgcacagccagagcctggaccggctgatgaatcctctcatcgaccaatacctgtattacctgaacagaactcaaaatcagtccggaagtgcccaaaacaaggacttgctgtttagccgtgggtctccagctggcatgtctgttcagcccaaaaactggctacctggaccctgttatcggcagcagcgcgtttctaaaacaaaaacagacaacgacaacagcaattttacctggactggtgcttcaaaatataacctcaatgggcgtgaatccatcatcaaccctggcactgctatggcctcacacaaagacgacgaagacaagttctttcccatgagcggtgtcatgatttttggaaaagagagcgccggagcttcaaacactgcattggacaatgtcatgattacagacgaagaggaaattaaagccactaaccctgtggccaccgaaagatttgggaccgtggcagtcaatttccagagcagcagcacagaccctgcgaccggagatgtgcatgctatgggagcattacctggcatggtgtggcaagatagagacgtgtacctgcagggtcccatttgggccaaaattcctcacacagatggacactttcacccgtctcctcttatgggcggctttggactcaagaacccgcctcctcagatcctcatcaaaaacacgcctgttcctgcgaatcctccggcggagttttcagctacaaagtttgcttcattcatcacccaatactccacaggacaagtgagtgtggaaattgaatgggagctgcagaaagaaaacagcaagcgctggaatcccgaagtgcagtacacatccaattatgcaaaatctgccaacgttgattttactgtggacaacaatggactttatactgagcctcgccccattggcacccgttaccttacccgtcccctg

SEQ ID NO: 668 - DNA, 2208 bp, Artificial Sequence
  source: /note="Description of Artificial Sequence: Synthetic polynucleotide"
atggctgccgatggttatcttccagattggctcgaggacaacctctctgagggcattcgcgagtggtgggacttgaaacctggagctccgaagcccaaagccaaccagcaaaagcaggacgacggccggggtctggtgcttcctggctacaagtacctcggacccttcaacggactcgacaagggggagcccgtcaacgcggcggacgcagcggccctcgagcacgacaaggcctacgaccagcagctcaaagcgggtgacaatccgtacctgcggtataaccacgccgacgccgagtttcaggagcgtctgcaagaagatacgtcttttgggggcaacctcgggcgagcagtcttccaggccaagaagcgggttctcgaacctctcggtctggttgaggaaggcgctaagacggctcctggaaagaaacgtccggtagagcagtcgccacaagagccagactcctcctcgggcatcggcaagacaggccagcagcccgctaaaaagagactcaattttggtcagactggcgactcagagtcagtccccgatccacaacctctcggagaacctccagcaacccccgctgctgtgggacctactacaatggcttcaggcggtggcgcaccaatggcagacaataacgaaggcgccgacggagtgggtaatgcctcaggaaattggcattgcgattccacatggctgggcgacagagtcatcaccaccagcacccgcacctgggccttgcccacctacaataaccacctctacaagcaaatctccagtgcttcaacgggggccagcaacgacaaccactacttcggctacagcaccccctgggggtattttgatttcaacagattccactgccacttttcaccacgtgactggcagcgactcatcaacaacaattggggattccggcccaagagactcaacttcaaactcttcaacatccaagtcaaggaggtcacgacgaatgatggcgtcacaaccatcgctaataaccttaccagcacggttcaagtcttctcggactcggagtaccagcttccgtacgtcctcggctctgcgcaccagggctgcctccctccgttcccggcggacgtgttcatgattccgcaatacggctacctgacgctcaacaatggcagccaagccgtgggacgttcatccttttactgcctggaatatttcccttctcagatgctgagaacgggcaacaactttaccttcagctacacctttgaggaagcgcctttccacagcagctacgcgcacagccagagcctggaccggctgatgaatcctctcatcgaccaatacctgtattacctgaacagaactcaaaatcagtccggaagtgcccaaaacaaggacttgctgtttagccgtgggtctccagctggcatgtctgttcagcccaaaaactggctacctggaccctgttatcggcagcagcgcgtttctaaaacaaaaacagacaacaacaacagcaattttacctggactggtgcttcaaaatataacctcaatgggcgtgaatccatcatcaaccctggcactgctatggcctcacacaaagacgacgaagacaagttctttcccatgagcggtgtcatgatttttggaaaagagagcgccggagcttcaaacactgcattggacaatgtcatgattacagacgaagaggaaattaaagccactaaccctgtggccaccgaaagatttgggaccgtggcagtcaatttccagagcagcagcacagaccctgcgaccggagatgtgcatgctatgggagcattacctggcatggtgtggcaagatagagacgtgtacctgcagggtcccatttgggccaaaattcctcacacagatggacactttcacccgtctcctcttatgggcggctttggactcaagaacccgcctcctcagatcctcatcaaaaacacgcctgttcctgcgaatcctccggcggagttttcagctacaaagtttgcttcattcatcacccaatactccacaggacaagtgagtgtggaaattgaatgggagctgcagaaagaaaacagcaagcgctggaatcccgaagtgcagtacacatccaattatgcgaaatctgccaacgttgattttactgtggacaacaatggactttatactgagcctcgccccgttggcacccgttaccttacccgtcccctg

SEQ ID NO: 669 - DNA, 2208 bp, Artificial Sequence
  source: /note="Description of Artificial Sequence: Synthetic polynucleotide"
atggctgccgatggttatcttccagattggctcgaggacaacctctctgagggcattcgcgagtggtgggacttgaaacctggagccccgaagcccaaagccaaccagcaaaagcaggacgacggccggggtctggtgcttcctggctacaagtacctcggacccttcaacggactcgacaagggggagcccgtcaacgcggcggacgcagcggccctcgagcacgacaaggcctacgaccagcagctcaaagcgggtgacaatccatacctgcggtataaccacgccgacgccgagtttcaggagcgtctgcaagaaaatacgtcttttgggggcaacctcgggcgagcagtcttccaggccaagaagcgggttctcgaacctctcggtctggttgaggaaggcgctaagacggctcctggaaagaaacgtccggtagagcagtcgccacaagagccagactcctcctcgggcatcggcaagacaggccagcagcccgctaaaaagagactcaattttggtcagactggcgactcagagtcagtccccgatccacaacctctcggagaacctccagcaacccccgctgctgtgggacctactacaatggcttcaggcggtggcgcaccaatggcagacaataacgaaggcgccgacggagtgggtaatgcctcaggaaattggcattgcgattccacatggctgggcgacagagtcatcaccaccagcacccgcacctgggccttgcccacctacaataaccacctctacaagcaaatctccagtgcttcaacgggggccagcaacgacaaccactacttcggctacagcaccccctgggggtattttgatttcaacagattccactgccactttccaccacgtgactggcagcgactcatcaacaacaattggggattccggcccaagagactcaacttcaaactcttcaacatccaagtcaaggaggtcacgtcgaatgatggcgtcacaaccatcgctaataaccttaccagcacggttcaagtcttctcggactcggagtaccagcttccgtacgtcctcggctctgcgcaccagggctgcctccctccgttcccggcggacgtgttcatgattccgcaatacggctacctgacgctcaacaatggcagccaagccgtgggacgttcatccttttactgcctggaatatttcccttctcagatgctgagaacgggcaacaactttaccttcagctacacctttgaggaagtgcctttccacagcagctacgcgcacagccagagcctggaccggctgatgaatcctctcatcgaccaatacctgtattacctgaacagaactcaaaatcagtccggaagtgcccaaaacaaggacttgctgtttagccgtgggtctccagctggcatgtctgttcagcccaaaaactggctacctggtccctgttatcggcagcagcgcgtttctaaaacaaaaacagacaacaacaacagcaattttacctggactggtgcttcaaaatataacctcaatgggcgtgaatccatcatcaaccctggcactgctatggcctcacacaaagacgacgaagacaagttctttcccatgagcggtgtcatgatttttggaaaagagagcgccggagcttcaaacactgcattggacaatgtcatgattacagacgaagaggaaattaaagccactaaccctgtggccaccgaaagatttgggaccgtggcagtcaatttccagagcagcagcacagaccctgcgaccggagatgtgcatgctatgggagcattacctggcatggtgtggcaagatagagacgtgtacctgcagggtcccatttgggccaaaattcctcacacagatggacactttcacccgtctcctcttatgggcggctttggactcaagaacccgcctcctcagatcctcatcaaaaacacgcctgttcctgcgaatcctccggcggagttttcagctacaaagtttgcttcattcatcacccaatactccacaggacaagtgagtgtggaaattgaatgggagctgcagaaagaaaacagcaagcgctggaatcccgaagtgcagtacacatccaattatgcaaaatctgccaacgttgattttactgtggacaacaatggactttatactgagcctcgccccattggcacccgttaccttacccgtcccctg

SEQ ID NO: 670 - DNA, 2208 bp, Artificial Sequence
  source: /note="Description of Artificial Sequence: Synthetic polynucleotide"
atggctgccgatggttatcttccagattggctcgaggacaacctctctgagggcattcgcgagtggtgggacttgaaacctggagccccgaagcccaaagccaaccagcaaaagcaggacgacggccggggtctggtgcttcctggctacaagtacctcggacccttcaacggactcgacaagggggagcccgtcaacgcggcggacgcagcggccctcgagcacgacaaggcctacgaccagcagctcaaagcgggtgacaatccgtacctgcggtataaccacgccgacgccgagtttcaggagcgtctgcaagaagatacgtcttttgggggcaacctcgggcgagcagtcttccaggccaagaagcgggttctcgaacctctcggtctggttgaggaaggcgctaagacggctcctggaaagaaacgtccggtagagcagtcgccacaagagccagactcctcctcgggcatcggcaagacaggccagcagcccgctaaaaagagactcaattttggtcagactggcgactcagagtcagtccccgatccacaacctctcggagaacctccagcaacccccgctgctgtgggacctactacaatggcttcaggcggtggcgcaccaatggcagacaataacgaaggcgccgacggagtgggtaatgcctcaggaaattggcattgcgattccacatggctgggcgacagagtcatcaccaccagcacccgcacctgggccttgcccacctacaataaccacctctacaagcaaatctccagtgcttcaacgggggccagcaacgacaaccactacttcggctacagcaccccctgggggtattttgatttcaacagattccactgccacttttcaccacgtgactggcagcgactcatcaacaacaattggggattccggcccaagagactcaacttcaaactcttcaacatccaagtcaaggaggtcacgacgaatgatggcgtcacaaccatcgctaataaccttaccagcacggttcaagtcttctcggactcggagtaccagcttccgtacgtcctcggctctgcgcaccagggctgcctccctccgttcccggcggacgtgttcatgattccgcaatacggctacctgacgctcaacaatggcagccaagccgtgggacgttcatccttttactgcctggaatatttcccttctcagatgctgagaacgggcaacaactttaccttcagctacacctttgaggaagtgcctttccacagcagctacgcgcacagccagagcctggaccggctgatgaatcctctcatcgaccaatacctgtattacctgaacagaactcaaaatcagtccggaagtgcccaaaacaaggacttgctgtttagccgtgggtctccagctggcacgtctgttcagcccaaaaactggctacctggaccctgttatcggcagcagcgcgtttctaaaacaaaaacagacaacaacaacagcaattttacctggactggtgcttcaaaatataacctcaatgggcgtgaatccatcatcaaccctggcactgctatggcctcacacaaagacgacgaagacaagttctttcccatgagcggtgtcatgatttttggaaaagagagcgccggagcttcaaacactgcattggacaatgtcatgattacagacgaagaggaaattaaagccactaaccctgtggccaccgaaagatttgggaccgtggcagtcaatttccagagcagcagcacagaccctgcgaccggagatgtgcatgctatgggagcattacctggcatggtgtggcaagatagagacgtgtacctgcagggtcccatttgggccaaaattcctcacacagatggacactttcacccgtctcctcttatgggcggctttggactcaagaacccgcctcctcagatcctcatcaaaaacacgcctgttcctgcgaatcctccggcggagttttcagctacaaagtttgcttcattcatcacccaatactccacaggacaagtgagtgtggaaattgaatgggagctgcagaaagaaaacagcaagcgctggaatcccgaagtgcagtacacatccaattatgcaaaatctgccaacgttgattttactgtggacaacaatggactttatactgggcctcgccccattggcacccgttaccttacccgtcccctg

SEQ ID NO: 671 - DNA, 2208 bp, Artificial Sequence
  source: /note="Description of Artificial Sequence: Synthetic polynucleotide"
atggctgccgatggttatcttccagattggctcgaggacaacctctctgagggcattcgcgagtggtgggacttgaaacctggagccccgaagcccaaagccaaccagcaaaagcaggacgacggccggggtctggtgcttcctggctacaagtacctcggacccttcaacggactcgacaagggggagcccgtcaacgcggcggacgcagcggccctcgagcacgacaaggcctacgaccagcagctcaaagcgggtgacaatccgtacctgcggtataaccacgccgacgccgagtttcaggagcgtctgcaagaagatacgtcttttgggggcaacctcgggcgagcagtcttccaggccaagaagcgggttctcgaacctctcggtctggttgaggaaggcgctaagacggctcctggaaagaaacgtccggtagagcagtcgccacaagagccagactcctcctcgggcatcggcaagacaggccagcagcccgctaaaaagagactcaattttggtcagactggcgactcagagtcagtccccgatccacaacctctcggagaacctccagcaacccccgctgctgtgggacctactacaatggcttcaggcggtggcgcaccaatggcagacaataacgaaggcgccgacggagtgggtaatgccccaggaaattggcattgcgactccacatggctgggcgacagagtcatcaccaccagcacccgcacctgggccttgcccacctacaataaccacctctacaagcaaatctccagtgcttcaacgggggccagcaacgacaaccactacttcggctacagcaccccctgggggtattttgatttcaacagattccactgccacttttcaccacgtgactggcagcgactcatcaacaacaattggggattccggcccaagagactcaacttcaaactcttcaacatccaagtcaaggaggtcacgacgaatgatggcgtcacaaccatcgctaataaccttaccagcacggttcaagtcttctcggactcggagtaccagcttccgtacgtcctcggctctgcgcaccagggctgcctccctccgttcccggcggacgtgttcatgattccgcaatacggctacctgacgctcaacaatggcagccaagccgtgggacgttcatccttttactgcctggaatatttcccttctcagatgctgagaacgggcaacaactttaccttcagctacacctttgaggaagtgcctttccacagcagctacgcgcacagccagagcctggaccggctgatgaatcctctcatcgaccaatacctgtattacctgaacagaactcaaaatcagtccggaagtgcccaaaacaaggacttgctgtttagccgtgggtctccagctggcatgtctgttcagcccaaaaactggctacctggaccctgttatcggcagcagcgcgtttctaaaacaaaaacagacaacaacaacagcaattttacctggactggtgcttcaaaatataacctcaatgggcgtgaatccatcatcaaccctggcacagctatggcctcacacaaagacgacgaagacaagttctttcccatgagcggtgtcatgatttttggaaaagagagcgccggagcttcaaacactgcattggacaatgtcatgattacaggcgaagaggaaattaaagccactaaccctgtggccaccgaaagatttgggaccgtggcagtcaatttccagagcagcagcacagaccctgcgaccggagatgtgcatgctatgggagcattacctggcatggtgtggcaagatagagacgtgtacctgcagggtcccatttgggccaaaattcctcacacagatggacactttcacccgtctcctcttatgggcggctttggactcaagaacccgcctcctcagatcctcatcaaaaacacgcctgttcctgcgaatcctccggcggagttttcagctacaaagtttgcttcattcatcacccaatactccacaggacaagtgagtgtggaaattgaatgggagctgcagaaagaaaacagcaagcgctggaatcccgaagtgcagtacacatccaattatgcaaaatctgccaacgttgattttactgtggacaacaatggactttatactgagcctcgccccattggcacccgttaccttacccgtcccctg

SEQ ID NO: 672 - DNA, 2208 bp, Artificial Sequence
  source: /note="Description of Artificial Sequence: Synthetic polynucleotide"
atggctgccgatggttatcttccagattggctcgaggacaacctctctgagggcattcgcgagtggtgggacttgaaacctggagccccgaagcccaaagccaaccagcaaaagcaggacgacggccggggtctggtgcttcctggctacaagtacctcggacccttcaacagactcgacaagggggagcccgtcaacgcggcggacgcagcggccctcgagcacgacaaggcctacgaccagcagctcaaagcgggtgacaatccgtacctgcggtataaccacgccgacgccgagtttcaggagcgtctgcaagaagatacgtcttttgggggcaacctcgggcgagcagtcttccaggccaagaagcgggttctcgaacctctcggtctggttgaggaaggcgctaagacggctcctggaaggaaacgtccggtagagcagtcgccacaagagccagactcctcctcgggcatcggcaagacaggccagcagcccgctaaaaagagactcaattttggtcagactggcgactcagagtcagtccccgatccacaacctctcggagaacctccagcaacccccgctgctgtgggacctactacaatggcttcaggcggtggcgcgccaatggcagacaataacgaaggcgccgacggagtgggtaatgcctcaggaaattggcattgcgattccacatggctgggcgacagagtcatcaccaccagcacccgcacctgggccttgcccacctacaataaccacctctacaagcaaatctccagtgcttcaacgggggccagcaacgacaaccactacttcggctacagcaccccctgggggtattttgatttcaacagattccactgccacttttcaccacgtgactggcagcgactcatcaacaacaattggggattccggcccaagagactcaacttcaaactcttcaacatccaagtcaaggaggtcacgacgaatgatggcgtcacaaccatcgctaataaccttaccagcacggttcaagtcttctcggactcggagtaccagcttccgtacgtcctcggctctgcgcaccagggctgcctccctccgttcccggcggacgtgttcatgattccgcaatacggctacctgacgctcaacaatggcggccaagccgtgggacgttcatccttttactgcctggaatatttcccttctcagatgctgagaacgggcaacaactttaccttcagctacacctttgaggaagtgcctttccacagcagctacgcgcacagccagagcctggaccggctgatgaatcctctcatcgaccaatacctgtattacctgaacagaactcaaaatcagtccggaagtgcccaaaacaaggacttgctgtttagccgtgggtctccagctggcatgtctgttcagcccaaaaactggctacctggaccctgttatcggcagcagcgcgtttctaaaacaaaaacagacaacaacaacagcaattttacctggactggtgcttcaaaatatagcctcaatgggcgtgaatccatcatcaaccctggcactgctatggcctcacacaaagacgacgaagacaagttctttcccatgggcggtgtcatgatttttggaaaagagagcgccggagcttcaaacactgcattggacaatgccatgattacagacgaagaggaaattaaagccactaaccctgtggccaccgaaagatttgggaccgtggcagtcaatttccagagcagcagcacagaccctgcgaccggagatgtgcatgctatgggagcattacctggcatggtgtggcaagatagagacgtgtacctgcagggtcccatttgggccaaaattcctcacacagatggacactttcacccgtctcctcttatgggcggctttggactcaagaacccgcctcctcagatcctcatcaaaaacacgcctgttcctgcgaatcctccggcggagttttcagctacaaagtttgcttcattcatcacccaatactccacaggacaagtgagtgtggaaattgaatgggagctgcagaaagaaaacagcaagcgctggaatcccgaagtgcagtacacatccaattatgcaaaatctgccaacgttgattttactgtggacaacaatggactttatactgagcctcgccccattggcacccgttaccttacccgtcccctg

SEQ ID NO: 673 - DNA, 2208 bp, Artificial Sequence
  source: /note="Description of Artificial Sequence: Synthetic polynucleotide"
atggctgccgatggttatcttccagattggctcgaggacaacctctctgagggcattcgcgagtggtgggacttgaaacctggagccccgaagcccaaagccaaccagcaaaagcaggacgacggccggggtctggtgcttcctggctacaagtacctcggacccttcaacggactcgacaagggggagcccgtcaacgcggcggacgcagcggccctcgagcacgacaaggcctacgaccagcagctcaaagcgggtgacaatccgtacctgcggtataaccacgccgacgccgagtttcaggagcgtctgcaagaagatacgtcttttgggggcaacctcgggcgagcagtcttccaggccaagaagcgggttctcgaacctctcggtctggttgaggaaggcgctaagacggctcctggaaagaaacgtccggtagagcagtcgccacaagagccagactcctcctcgggcatcggcaagacaggccagcagcccgctaaaaagagactcaattttggtcagactggcgactcagagtcagtccccgatccacaacctctcggagaacctccagcaacccccgctgctgtgggacctactacaatggcttcaggcggtggcgcaccaatggcagacaataacgaaggcgccgacggagtgggtaatgcctcaggaaattggcattgcgattccacatggctgggcggcagagtcatcaccaccagcacccgcacctgggccttgcccacctacaataaccacctctacaagcaaatctccagtgcttcaacgggggccagcaacgacaaccactacttcggctacagcaccccctgggggtattttgatttcaacagattccactgccacttttcaccacgtgactggcagcgactcatcaacaacaattggggattccggcccaagagactcaacttcaaactcttcaacatccaagtcaaggaggtcacgacgaatgatggcgtcacaaccatcgctaataaccttaccagcacggttcaagtcttctcggactcggagtaccagcttccgtacgtcctcggctctgcgcaccagggctgcctccctccgttcccggcggacgtgttcatgattccgcaatacggctacctgacgctcaacaatggcagccaagccgtgggacgttcatccttttactgcctggaatatttcccttctcagatgctgagaacgggcaacaactctaccttcagctacacctttgaggaagtgcctttccacagcagctacgcgcacagccagagcctggaccggctgatgaatcctctcatcgaccaatacctgtattacctgaacagaactcaaaatcagtccggaagtgcccaaaacaaggacttgctgtttagccgtgggtctccagctggcatgtctgttcagcccaaaaactggctacctggaccctgttatcggcagcagcgcgtttctaaaacaaaaacagacaacaacaacagcaattttacctggactggtgcttcaaaatataacctcaatgggcgtgaatccatcatcaaccctggcactgctatggcctcacacaaagacgacgaagacaagttctttcccatgagcggtgtcatgatttttggaaaagagagcgccggagcttcaaacactgcattggacaatgtcatgattacagacgaagaggaaattaaagccactaaccctgtggccaccgaaagatttgggaccgtggcagtcaatttccagagcagcagcacagaccctgcgaccggagatgtgcatgctatgggaacattacctggcatggtgtggcaagatagagacgtgtacctgcagggtcccatttgggccaaaattcctcacacagatggacactttcacccgtctcctcttatgggcggctttggactcaagaacccgcctcctcagatcctcatcaaaaacacgcctgttcctgcgaatcctccggcggagttttcagctacaaagtttgcttcattcatcacccaatactccacaggacaagtgagtgtggaaattgaatgggagctgcagaaagaaaacagcaagcgctggaatcccgaagtgcagtacacatccaattatgcaaaatctgccaacgttgattttactgtggacaacaatggactttatactgagcctcgccccattggcacccgttaccttacccgtcccctg

SEQ ID NO: 674 - DNA, 2208 bp, Artificial Sequence
  source: /note="Description of Artificial Sequence: Synthetic polynucleotide"
atggctgccgatggttatctcccagattggctcgaggacaacctctctgagggcattcgcgagtggtgggacttgaaacctggagccccgaagcccaaagccaaccagcaaaagcaggacgacggccggggtctggtgcttcctggctacaagtacctcggacccttcaacggactcgacaagggggagcccgtcagcgcggcggacgcagcggccctcgagcacgacaaggcctacgaccagcagctcaaagcgggtgacaatccgtacctgcggtataaccacgccgacgccgagtttcaggagcgtctgcaagaagatacgtcttttgggggcaacctcgggcgagcagtcttccaggccaagaagcgggttctcgaacctctcggtctggttgaggaaggcgctaagacggctcctggaaagaaacgtccggtagagcagtcgccacaagagccagactcctcctcgggcatcggcaagacaggccagcagcccgctaaagagagactcaattttggtcagactggcgactcagagtcagtccccgatccacaacctctcggagaacctccagcaacccccgctgctgtgggacctactacaatggcttcaggcggtggcgcaccaatggcagacaataacgaaggcgccgacggagtgggtaatgcctcaggaaattggcattgcgattccacatggctgggcgacagagtcatcaccaccagcacccgcacctgggccttgcccacctacaataaccacctctacaagcaaatctccagtgcttcaacgggggccagcaacgacaaccactacttcggctacagcaccccctgggggtattttgatttcaacagattccactgccacttttcaccacgtgactggcagcgactcatcaacaacaattggggattccggcccaagagactcaacttcaaactcttcaacatccaagtcaaggaggtcacgacgaatgatggcgtcacaaccatcgccaataaccttaccagcacggttcaagtcttctcggactcggagtaccagcttccgtacgtcctcggctctgcgcaccagggctgcctccctccgttcccggcggacgtgttcatgattccgcaatacggctacctgacgctcaacaatggcagccaagccgtgggacgttcatccttttactgcctggaatatttcccttctcagatgctgagaacgggcaacaactttaccttcagctacacctttgaggaagtgcctttccacagcagctacgcgcacagccagagcctggaccggctgatgaatcctctcatcgaccaatacctgtattacctgaacagaactcaaaatcagtccggaagtgcccaaaacaaggacttgctgtttagccgtgggtctccagctggcatgtctgttcagcccaaaaactggctacctggaccctgttatcggcagcagcgcgtttctaaaacaaaaacagacaacaacaacagcaattttacctggactggtgcttcaaaatataacctcaatgggcgtgaatccatcatcaaccctggcactgctatggcctcacacaaagacgacgaagacaagttctttcccatgagcggtgtcatgatttttggaaaagagagcgccggagcttcaaacactgcattggacaatgtcatgattacagacgaagaggaaattaaagccactaaccctgtggccaccgaaagatttgggaccgtggcagtcaatttccagagcagcagcacagaccctgcgaccggagatgtgcatgctatgggagcattacctggcatggtgtggcaagatagagacgtgtacctgcagggtcccatttgggccaaaattcctcacacagatggacactttcacccgtctcctcttatgggcggctttggactcaagaacccgcctcctcagatcctcatcaaaaacacgcctgttcctgcgaatcctccggcggagttttcagctacaaagtttgcttcattcatcacccaatactccacaggacaagtgagtgtggaaattgaatgggagctgcagaaagaaaacagcaagcgctggaatcccgaagtgcagtacacatccaattatgcaaaatctgccaacgttgattttactgtggacaacaatggactttatactgagcctcgccccattggcacccgttaccttacccgtcccctg

SEQ ID NO: 675 - DNA, 2208 bp, Artificial Sequence
  source: /note="Description of Artificial Sequence: Synthetic polynucleotide"
atggctgccgatggttatcttccagattggctcgaggacaacctctctgagggcattcgcgagtggtgggacttgaaacctggagccccgaagcccaaagccaaccagcaaaagcaggacgacggccggggtctggtgcttcctggctacaagtacctcggacccttcaacggactcgacaagggggagcccgtcaacgcggcggacgcagcggccctcgagcacgacaaggcctacgaccagcagctcaaagcgggtgacaatccgtacctgcggtataaccacgccgacgccgagtttcaggagcgtctgcaagaagatacgtcttttgggggcaacctcgggcgagcagtcttccaggccaagaagcgggttctcgaacctctcggtctggttgaggaaggcgctaagacggctcctggaaagaaacgtccggtagagcagtcgccacaagagccagactcctcctcgggcatcggcaagacaggccagcagcccgctaaaaagagactcaattttggtcagactggcgactcagagtcagtccccgatccacaacctctcggagaacctccagcaacccccgctgctgtgggacctactacaatggcttcaggcggtggcgcaccaatggcagacaataacgaaggcgccgacggagtgggtaatgcctcaggaaattggcattgcgattccacatggctgggcgacagagtcatcaccaccagcacccgcacctgggccttgcccacctacaataaccacctctacaagcaaatctccagtgcttcaacgggggccagcaacgacaaccactacttcggctacagcaccccctgggggtattttgatttcaacagattccactgccacttttcaccacgtgactggcagcgactcatcaacaacaattggggattccggcccaagagactcaacttcaaactcttcaacatccaagtcaaggaggtcacgacgaatgatggcgtcacaaccatcgctaataaccttaccagcacggttcaagtcttctcggactcggagtaccagcttccgtacgtcctcggctctgcgcaccagggctgcctccctccgttcccggcggacgtgttcatgattccgcaatacggctacctgacgctcaacaatggcagccaagccgtgggacgttcatccttttactgcctggaatatttcccttctcagatgctgagaacgggcaacaactttaccttcagctacacctttgaggaagtgcctttccacagcagctacgcgcacagccagagcctggaccggctgatgaatcctctcatcgaccaatacctgtattacctgaacagaactcaaaatcagtccggaagtgcccaaaacaaggacttgctgtttagccgtgggtctccagctggcatgtctgttcagcccaaaaactggctacctggaccctgttatcggcagcagcgcgtttctaaaacaaaaacagacaacaacaacagcaattttacctggactggtgcttcaaaatataacctcaatgggcgtgaatccatcatcaaccctggcactgctatggcctcacacaaagacgacgaagacaagttctttcccatgagcggtgtcatgatttttggaaaagagagcgccggagcttcaaacactgcattggacaatgtcatgattacagacgaaggggaaattaaagccactaaccctgtggccaccgaaagatttgggaccgtggcagtcaatttccagagcagcagcacagaccctgcgaccggagatgtgcatgctatgggagcattacctggcatggtgtggcaagatagagacgtgtacctgcagggtcccatttgggccaaaattcctcacacagatggacactttcacccgtctcctcttatgggcggctttggactcaagaacccgcctcctcagatcctcatcaaaaacacgcctgttcctgcgaatcctccggcggagttttcagctacaaagtttgcttcattcatcacccaatactccacaggacaagtgagtgtggaaattgaatgggagctgcagaaagaaaacagcaagcgctggaatcccgaagtgcagtacacatccaattatgcaaaatctgccaacgttgattttactgtggacaacaatggactttatactgagcctcgccccattggcacccgttaccttacccgtcccctg

SEQ ID NO: 676 - DNA, 2208 bp, Artificial Sequence
  source: /note="Description of Artificial Sequence: Synthetic polynucleotide"
atggctgccgatggttatcttccagattggctcgaggacaacctctctgagggcattcgcgagtggtgggacttgaaacctggagccccgaaacctaaagccaaccagcaaaagcaggacgacggccggggtctggtgcttcctggctacaagtacctcggacccttcaacggactcgacaagggggagcccgtcaacgcggcggacgcagcggccctcgagcacgacaaggcctacgaccagcagctcaaagcgggtgacaatccgtacctgcggtataaccacgccgacgccgagtttcaggagcgtctgcaagaagatacgtcttttgggggcaacctcgggcgagcagtcttccaggccaagaagcgggttctcgaaccttttggtctggttgaggaaggcgctaagacggctcctggaaagaaacgtccggtagagcagtcgccacaagagccagactcctcctcgggcatcggcaagacaggccagcagcccgctaaaaagagactcaattttggtcagactggcgactcagagtcagtccccgacccacaacctctcggagaacctccagcaacccccgctgctgtgggacctactacaatggcttcaggcggtggcgcaccaatggcagacaataacgaaggcgccgacggagtgggtaatgcctcaggaaattggcattgcgattccacatggctgggcgacagagtcatcaccaccagcacccgcacctgggccttgcccacctacaataaccacctctacaagcaaatctccagtgcttcaacgggggccagcaacgacaaccactacttcggctacagcaccccctgggggtattttgatttcaacagattccactgccacttttcaccacgtgactggcagcgactcatcaacaacaattggggattccggcccaagagactcaacttcaagctcttcaacatccaagtcaaggaggtcacgacgaacgatggcgtcacgaccatcgctaataaccttaccagcacggttcaagtcttctcggattcagagtaccaactgccgtacgtcctcggctctgcgcaccagggctgcctccctccgttcccggcggacgtgtttatgattccgcagtacggctacctaacgctcaacaatggcagccaggccgtgggacgttcatccttttactgcccggaatatttcccttctcagatgctgagaacgggcaacaactttaccttcagctacacctttgaggaagtgcctttccacagcagctacgcgcacagccagagcctggaccggctgatgaatcctctcatcgaccaatacctgtattacctgaacagaactcaaaatcagtccggaagtgcccaaaacaaggacttgctgtttagccgtgggtctccagctggcatgtctgttcagcccaaaaactggctacctggaccctgttatcggcagcagcgcgtttctaaaacaaaaacagacaacaacaacagcaattttacctggactggtgcttcaaaatataacctcaatgggcgtgaatccatcatcaaccctggcactgctatggcctcacacaaagacgacaaagacaagttctttcccatgagcggtgtcatgatttttggaaaagagagcgccggagcttcaaatactgcattggacaatgtcatgatcacagatgaagaggaaattaaagccactaaccctgtggccaccgaaagatttgggaccgtggcagtcaatttccagagcagcaacacagaccccgcgaccggagatgtgcatgttatgggagccttacctggcatggtgtggcaagacagagacgtatacctgcagggtcccatttgggccaaaattcctcacacggatggacactttcacccgtctcctctcatgggcggctttggacttaagcacccgcctcctcaaatcctcatcaaaaacacgcctgttcctgcgaatcctccggcagagttttcggctacaaagtttgcttcattcatcacccagtactccacaggacaagtgagtgtggaaattgaatgggagctgcagaaagaaaacagcaagcgctggaatcccgaagtgcagtacacatccaattatgcaaaatctgccaacgttgatttcactgtggacaacaatggactttatactgagcctcgccccattggcacccgttaccttacccgtcccttg

SEQ ID NO: 677 - DNA, 2208 bp, Artificial Sequence
  source: /note="Description of Artificial Sequence: Synthetic polynucleotide"
atggctgccgatggttatcttccagattggctcgaggacaacctctctgagggcattcgcgagtggtgggacttgaaacctggagccccgaaacctaaagccaaccagcaaaagcaggacgacggccggggtctggtgcttcctggctacaagtacctcggacccttcaacggactcgacaagggggagcccgtcaacgcggcggacgcagcggccctcgagcacgacaaggcctacgaccagcagctcaaagcgggtgacaatccgtacctgcggtataaccacgccgacgccgagtttcaggagcgtctacaagaagatacgtcttttgggggcaacctcgggcgagcagtcttccaggccaagaagcgggttctcgaaccttttggtctggttgaggaaggcgctaagacggctcctggaaagaaacgtccggtagagcagtcgccacaagagccagactcctcctcgggcatcggcaagacaggccagcagcccgctaaaaagagactcaattttggtcagactggcgactcagagtcagtccccgacccacaacctctcggagaacctccagcaacccccgctgctgtgggacctactacaatggcttcaggcggtggcgcaccaatggcagacaataacgaaggcgccgacggagtgggtaatgcctcaggaaattggcattgcgattccacatggctgggcgacagagtcatcaccaccagcacccgcacctgggccttgcccacctacaataaccacctctacaagcaaatctccagtgcttcaacgggggccagcaacgacaaccactacttcggctacagcaccccctgggggtattttgatttcaacagattccactgccacttttcaccacgtgactggcagcgactcatcaacaacaattggggattccggcccaagagactcaacttcaagctcttcaacatccaagtcaaggaggtcacgacgaacgatggcgtcacgaccatcgctaataaccttaccagcacggttcaagtcttctcggattcagagtaccaactgccgtacgtcctcggctctgcgcaccagggctgcctccctccgttcccggcggacgtgttcatgattccgcagtacggctacctaacgctcaacaatggcagccaggccgtgggacgttcatccttttactgcctggaatatttcccttctcagatgctgagaacgggcaacaactttaccttcagctacacctttgaggaagtgcctttccacagcagctacgcgcacagccagagcctggaccggctgatgaatcctctcatcgaccaatacctgtattacctgaacagaactcaaaatcagtccggaagtgcccaaaacaaggacttgctgtttagccgtgggtctccagctggcatgtctgttcagcccaaaaactggctacctggaccctgttatcggcagcagcgcgtttctaaaacaaaaacagacaacaacaacagcaattttacctggactggtgcttcaaaatataacctcaatgggcgtgaatccatcatcaaccctggcactgctatggcctcacacaaagacgacaaagacaagttctttcccatgagcggtgtcatgatttttggaaaagagagcgccggagcttcaaatactgcattggacaatgtcatgatcacagatgaagaggaaattaaagccactaaccctgtggccaccgaaagatttgggaccgtggcagtcaatttccagagcagcgacacagaccccgcgaccggagatgtgcatgttatgggagccttacctggcatggtgtggcaagacagagacgtatacctgcagggtcccatttgggccaaaattcctcacacggatggacactttcacccgtctcctctcatgggcggctttggacttaagcacccgcctcctcaaatcctcatcaaaaacacgcctgttcctgcgaatcctccggcagagttttcggctacaaagtttgcttcattcatcacccagtactccacaggacaagtgagtgtggaaattgaatgggagctgcagaaagaaaacagcaagcgctggaatcccgaagtgcagtacacatccaattatgcaaaatctgccaacgttgatttcactgtggacaacaatggactttatactgagcctcgccccattggcacccgttaccttacccgtcccttg

SEQ ID NO: 678 - DNA, 2208 bp, Artificial Sequence
  source: /note="Description of Artificial Sequence: Synthetic polynucleotide"
atggctgccgatggttatcttccagattggctcgaggacaacctctctgagggcattcgcgagtggtgggacttgaaacctggagccccgaaacctaaagccaaccagcaaaagcagggcgacggccggggtctggtgcttcctggctacaagtacctcggacccttcaacggactcgacaagggggagcccgtcaacgcggcggacgcagcggccctcgagcacgacaaggcctacgaccagcagctcaaagcgggtgacaatccgtacctgcggtataaccacgccgacgccgagtttcaggagcgtctgcaagaagatacgtcttttgggggcaacctcgggcgagcagtcttccaggccaagaagcgggttctcgaaccttttggtctggttgaggaaggcgctaagacggctcctggaaagaaacgtccggtagagcagtcgccacaagagccagactcctcctcgggcatcggcaagacaggccagcagcccgctaaaaagagactcaattttggtcagactggcgactcagagtcagtccccgacccacaacctctcggagaacctccagcaacccccgctgctgtgggacctactacaatggcttcaggcggtggcgcaccaatggcagacaataacgaaggcgccgacggagtgggtaatgcctcaggaaattggcattgcgattccacatggctgggcgacagagtcatcaccaccaacactcgcacctgggccttgcccacctacaataaccacctctacaagcaaatctccagtgcttcaacgggggccagcaacgacaaccactacttcggctacagcaccccctgggggtattttgatttcaacagattccactgccacttttcaccacgtgactggcagcgactcatcaacaacaattggggattccggcccaagagactcaacttcaagctcttcaacatccaagtcaaggaggtcacgacgaacgatggcgtcacgaccatcgctaataaccttaccagcacggttcaagtcttctcggattcagagtaccaactgccgtacgtcctcggctctgcgcaccagggctgcctccctccgttcccggcggacgtgttcatgattccgcagtacggctacctaacgctcaacaatggcagccaggccgtgggacgttcatccttttactgcctggaatatttcccttctcagatgctgagaacgggcaacaactttaccttcagctacacctttgaggaagtgcctttccacagcagttacgggcacagccagagcctggaccggctgatgaatcttctcatcgaccaatacctgtattacctgaacagaactcaaaatcagtccggaagtgcccaaaacaaggacttgctgtttagccgtgggtctccagctggcatgtttgttcagcccaaaaactggctacctggaccctgttatcggcagcagcgcgtttctaaaacaaaaacagacaacaacaacagcaattttacctggactggtgcttcaaaatataacctcaatgggcgtgaatccatcatcaaccctggcactgctatggcctcacacaaagacgacgaagacaagttctttcccatgagcggtgtcatgatttttggaaaagagagcgccggagcttcaaatactgcattggacaatgtcatgatcacagatgaagaggaaattaaagccactaaccctgtggccaccgaaagatttgggaccgtggcagtcaatttccagagcagcagcacagaccccgcgaccggagatgtgcatgttatgggagccttacctggcatggtgtggcaagacagagacgtatacctgcagggtcccatttgggccaaaattcctcacacggatggacactttcacccgtctcctctcatgggcggctttggacttaagcacccgcctcctcaaatcctcatcaaaaacacgcctgttcctgcgaatcctccggcagagttttcggctacaaagtttgcttcattcatcacccagtactccacaggacaagtgagtgtggaaattgaatgggagctgcagaaagaaaacagcaagcgctggaatcccgaagtgcagtacacatccaattatgcaaaatctgccaacgttgatttcactgtggacaacaatggactttatactgagcctcgccccattggcacccgttaccttacccgtcccttg

SEQ ID NO: 679 - DNA, 2208 bp, Artificial Sequence
  source: /note="Description of Artificial Sequence: Synthetic polynucleotide"
atggctgccgatggttatcttccagattggctcgaggacaacctctctgagggcattcgcgagtggtgggacttgaaacctggagccccgaaacctaaagccaaccagcaaaagcaggacgacggccggggtctggtgcttcctggctacaagtacctcggacccttcaacggactcgacaagggggagcccgtcaacgcggcggacgcagcggccctcgagcacgacaaggcctacgaccagcagctcaaagcgggtgacaatccgtacctgcggtataaccacgccgacgccgagtttcaggagcgtctgcaagaagatacgtcttttgggggcaacctcgggcgagcagtcttccaggccaagaagcgggttctcgaaccttttggtctggttgaggaaggcgctaagacggctcctggaaagaaacgtccggtagagcagtcgccacaagagccagactcctcctcgggcatcggcaagacaggccagcagcccgctaaaaagagactcaattttggtcagactggcgactcagagtcagtccccgacccacaacctctcggagaacctccagcaacccccgctgctgtgggacctactacaatggcttcaggcggtggcgcaccaatggcagacaataacgaaggcgccgacggagtgggtaatgcctcaggaaattggcattgcgattccacatggctgggcgacagagtcatcaccaccaacacccgcacctgggccttgcccacctacaataaccacctctacaagcaaatctccagtgcttcaacgggggccagcaacgacaaccactacttcggctacagcaccccctgggggtattttgatttcaacagattccactgccacttttcaccacgtgactggcagcgactcatcaacaacaattggggattccggcccaagagactcaacttcaagctcttcaacatccaagtcaaggaggtcacgacgaacgatggcgtcacgaccatcgctaataaccttaccagcacggttcaagtcttctcggattcagagtaccaactgccgtacgtcctcggctctgcgcaccagggctgcctccctccgttcccggcggacgtgttcatgattccgcagtacggctacctaatgctcaacaatggcagccaggccgtgggacgttcatccttttactgcctggaatatttcccttctcagatgctgagaacgggcaacaactttaccttcagctacacctttgaggaagtgcctttccacagcagctacgcgcacagccagagcctggaccggctgatgaatcctctcatcgaccaatacctgtattacctgaacagaactcaaaatcagtccggaagtgcccaaaacaaggacttgctgtttagccgtgggtctccagctggcatgtctgttcagcccaaaaactggctacctggaccctgttatcggcagcagcgcgtttctaaaacaaaaacagacaacaacaacagcaattttacctggactggtgcttcaaaatataacctcaatgggcgtgaatccatcatcaaccctggcactgctatggcctcacacaaagacgacgaagacaagttctttcccatgagcggtgtcatgatttttggaaaagagagcgccggagcttcaaatactgcattggacaatgtcatgatcacagatgaagaggaaattaaagccactaaccctgcggccaccgaaagatttgggaccgtggcagtcaatttccagagcagcagcacagaccccgcgaccggagatgtgcatgttatgggagccttacctggcatggtgtggcaagacagagacgtatacctgcagggtcccatttgggccaaaattcctcacacggatggacactttcacccgtctcctctcatgggcggctttggacttaagcacccgcctcctcaaatcctcatcaaaaacacgcctgttcctgcgaatcctccggcagagttttcggctacaaagtttgcttcattcatcacccagtactccacaggacaagtgagtgtggaaattgaatgggagctgcagaaagaaaacagcaagcgctggaatcccgaagtgcagtacacatccaattatgcaaaatctgccaacgttgatttcactgtggacaacaatggactttatactgagcctcgccccattggcacccgttaccttacccgtcccttg

SEQ ID NO: 680 - DNA, 2208 bp, Artificial Sequence
  source: /note="Description of Artificial Sequence: Synthetic polynucleotide"
atggctgccgatggttatcttccagattggctcgaggacaacctctctgagggcattcgcgagtggtgggacttgaaacctggagccccgaaacctaaagccaaccagcaaaagcaggacgacggccggggtctggtgcttcctggctacaagtacctcggacccttcaacggactcgacaagggggagcccgtcaacgcggcggacgcagcggccctcgagcacgacaaggcctacgaccagcagctcaaagcgggtgacaatccgtacctgcggtataaccacgccgacgccgagtttcaggagcgtctgcaagaagatacgtcttttgggggcaacctcgggcgagcagtcttccaggccaagaagcgggttctcgaaccttttggtctggttgaggaaggcgctaagacggctcctggaaagaaacgtccggtagagcagtcgccacaagagccagactcctcctcgggcatcggcaagacgggccagcagcccgctaaaaagagactcaattttggtcagactggcgactcagagtcagtccccgacccacaacctctcggagaacctccagcaacccccgctgctgtgggacctactacaatggcttcaggcggtggcgcaccaatggcagacaataacgaaggcgccgacggagtgggtaatgcctcaggaaattggcattgcgattccacatggctgggcgacagagtcatcaccaccagcacccgcacctgggccttgcccacctacaataaccacctctacaagcaaatctccagtgcttcaacgggggccagcaacgacaaccactacttcggctacagcaccccctgggggtattttgatttcaacagattccactgccacttttcaccacgtgactggcagcgactcatcaacaacaattggggattccggcccaagagactcaacttcaagctcttcaacatccaagtcaaggaggtcacgacgaacgatggcgtcacgaccatcgctaataaccttaccagcacggttcaagtcttctcggattcagagtaccaactgccgtacgtcctcggctctgcgcaccagggctgcctccctccgttcccggcggacgtgttcatgattccgcagtacggctacctaacgctcaacaatggcagccaggccgtgggacgttcatccttttactgcctggaatatttcccttctcagatgctgagaacgggcaacaactttaccttcagctacacctttgaggaagtgcctttccacagcagctacgcgcacagccagagcctggaccggctgatgaatcctctcatcgaccaatacctgtattacctgaacagaactcaaaatcagtccggaagtgcccaaaacaaggacttgctgtttagccgtgggtctccagctggcatgtccgttcagcccaaaaactggctacctggaccctgttatcggcagcagcgcgtttctaaaacaaaaacagacaacaacaacagcaattttacctggactggtgcttcaaaatataacctcaatgggcgtgaatccatcatcaaccctggcactgctatggcctcacacaaagacgacgaagacaagttctttcccatgagcggtgtcatgatttttggaaaagagagcgccggagcttcaaatactgcattggacaatgtcatgatcacagatgaagaggaaattaaagccactaaccctgtggccaccgaaagatttgggaccgtggcagtcaatttccagagcagcagcacagaccccgcgaccggagatgtgcatgttatgggagccttacctggcatggtgtggcaagacagagacgtatacctgcagggtcccatttgggccaaaattcctcacacggatggacactttcacccgtctcctctcatgggcggctttggacttaagcacccgcctcctcaaatcctcatcaaaaacacgcctgttcctgcgaatcctccggcagagttttcggctacaaagtttgcttcattcatcacccagtactccacaggacaagtgagtgtggaaattgaatgggagctgcagaaagaaaacagcaagcgctggaatcccgaagtgcagtacacatccaattatgcaaaatctgccaacgttgatttcactgtggacaacaatggactttatactgagcctcgccccattggcacccgttaccttacccgtcccttg

SEQ ID NO: 681 - DNA, 2208 bp, Artificial Sequence
  source: /note="Description of Artificial Sequence: Synthetic polynucleotide"
  modified_base (305)..(305): a, c, t, or g
atggctgccgatggttatcttccagattggctcgaggacaacctctctgagggcattcgcgagtggtgggacttgaaacctggagccccgaaacctaaagccaaccagcaaaagcaggacgacggccggggtctggtgcttcctggctacaagtacctcggacccttcaacggactcgacaagggggagcccgtcaacgcggcggacgcagcggccctcgagcacgacaaggcctacgaccagcagctcaaagcgggtgacaatccgtacctgcggtataaccacgccgacgccgagtttcaggngcgtctgcaagaagatacgtcttttgggggcaacctcgggcgagcagtcttccaggccaagaagcgggttctcgaaccttttggtctggttgaggaaggcgctaagacggctcctggaaagaaacgtccggtagagcagtcgccacaagagccagactcctcctcgggcatcggcaagacaggccagcagcccgctaaaaagagactcaattttggtcagactggcgactcagagtcagtccccgacccacaacctctcggagaacctccagcaacccccgctgctgtgggacctactacaatggcttcaggcggtggcgcaccaatggcagacaataacgaaggcgccgacggagtgggtaatgcctcaggaaattggcattgcgattccacatggctgggcggcagagtcatcaccaccagcacccgcacctgggccttgcccacctacaataaccacctctacaagcaaatctccagtgcttcaacgggggccagcaacgacaaccactacttcggccacagcaccccctgggggtattttgatttcaacagattccactgccacttttcaccacgtgactggcagcgactcatcaacaacaattggggattccggcccaagagactcaacttcaagctcttcaacatccaagtcaaggaggtcacgacgaacgatggcgtcacgaccatcgctaataaccttaccagcacggttcaagtcttctcggattcagagtaccaactgccgtacgtcctcggctctgcgcaccagggctgcctccctccgtccccggcggacgtgttcatgattccgcagtacggctacctaacactcaacaatggcagccaggccgtgggacgttcatccttttactgcctggaatatttcccttctcagatgctgagaacgggcaacaactttaccttcagctacacctttgaggaagtgcctttccacagcagctacgcgcacagccagagcctggaccggctgatgaatcctctcatcgaccaatacctgtattacctgaacagaactcaaaatcagtccggaagtgcccaaaacaaggacttgctgtttagccgtgggtctccagctggcatgtctgttcagcccaaaaactggctacctggaccctgttatcggcagcagcgcgtttctaaaacaaaaacagacaacaacaacagcaattttacctggactggtgcttcaaaatataacctcaatgggcgtgaatccatcatcaaccctggcactgctatggcctcacacaaagacgacaaagacaagttctttcccatgagcggtgtcatgatttttggaaaagagagcgccggagcttcaaatactgcattggacaatgtcatgatcacagatgaagaggaaattaaagccactaaccctgtggccaccgaaagatttgggaccgtggcagtcaatttccagagcagcaacacagaccccgcgaccggagatgtgcatgttatgggagccttacctggcatggtgtggcaagacagagacgtatacctgcagggtcccatttgggccaaaattcctcacacggatggacactttcacccgtctcctctcatgggcggctttggacttaagcacccgcctcctcaaatcctcatcaaaaacacgcctgttcctgcgaatcctccggcagagttttcggctacaaagtttgcttcattcatcacccagtactccacaggacaagtgagtgtggaaattgaatgggagctgcagaaagaaaacagcaagcgctggaatcccgaagtgcagtacacatccaattatgcaaaatctgccaacgttgatttcactgtggacaacaatggactttatactgagcctcgccccattggcacccgttaccttacccgtcccttg

SEQ ID NO: 682 - DNA, 2208 bp, Artificial Sequence
  source: /note="Description of Artificial Sequence: Synthetic polynucleotide"
atggctgccgatggttattttccagattggctcgaggacaacctttctgagggcattcgcgagtggtgggacttgaaacctggagccccgaaacctaaagccaaccagcaaaagcaggacgacggccggggtctggtgcttcctggctacaagtacctcggacccttcaacggactcgacaagggggagcccgtcaacgcggcggacgcagcggccctcgagcacgacaaggcctacgaccagcagctcaaagcgggtgacaatccgtacctgcggtataaccacgccgacgccgagtttcaggagcgtctgcaagaagatacgtcttttgggggcaacctcgggcgagcagtcttccaggccaagaagcgggttctcgaaccttttggtctggttgaggaaggcgctaagacggctcctggaaagaaacgtccggtagagcagtcgccacaagagccagactcctcctcgggcatcggcaggacaggccagcagcccgctaaaaagagactcaattttggtcagactggcgactcagagtcagtccccgacccacaacctctcggagaacctccagcgacccccgctgctgtgggacctactacaatggcttcaggcggtggcgcaccaatggcagacaataacgaaggtgccgacggagtgggtaatgcctcaggaaattggcattgcgattccacatggctgggcgacagagtcatcaccaccagcacccgcacctgggccttgcccacctacaataaccacctctacaagcaaatctccagtgcttcaacgggggccagcaacgacaaccactacttcggctacagcaccccctgggggtattttgatttcaacagattccactgccacttttcaccacgtgactggcagcgactcatcaacaacaattggggattccggcccaagagactcaacttcaagctcttcaacatccaagtcaaggaggtcacgacgaacgatggcgtcacgaccatcgctaataaccttaccagcacggttcaagtcttctcggattcagagtaccaactgccgtacgtcctcggctctgcgcaccagggctgcctccctccgttcccggcggacgtgttcatgattccgcagtacggctacctaacgctcaacaatggcagccaggccgtgggacgttcatccttttactgcctggaatatttcccttctcagatgctgagaacgggcaacaactttaccttcagctacacctttgaggaagtgcctttccacagcagctacgcgcacagccagagcctggaccggctgatgaatcctctcatcgaccaatacctgtattacctgaacagaactcaaaatcagtccggaagtgcccaaaacaaggacttgctgtttagccgtgggtctccagctggcatgtctgttcagcccaaaaactggctacctggaccctgttatcggcagcagcgcgtttctaaaacaaaaacagacaacaacaacagcaattttacctggactggtgcttcaaaatataacctcaatgggcgtgaatccatcatcaaccctggcactgctatggcctcacacaaagacgacgaagacaagttctttcccatgagcggtgtcatgatttttggaaaagagagcgccggagcttcaaatactgcattggacaatgtcatgatcacagatgaagaggaaattaaagccactaaccctgtggccaccgaaagatttgggaccgtggcagtcaatttccagagcagcagcccagaccccgcgaccggagatgtgcatgttatgggagccttacctggcatggtgtggcaagacagagacgtatacctgcagggtcccatttgggccaaaattcctcacacggatggacactttcacccgtctcctctcatgggcggctttggacttaagcacccgcctcctcaaatcctcatcaaaaacacgcctgttcctgcgaatcctccggcagagttttcggctacaaagtttgcttcattcatcacccagtactccacaggacaagtgagtgtggaaattgaatgggagctgcagaaagaaaacagcaagcgctggaatcccgaagtgcagtacacatccaattatgcaaaatctgccaacgttgatttcactgtggacaacaatggactttatagtgagcctcgccccattggcacccgttaccttacccgtcccttg

SEQ ID NO: 683 - DNA, 2208 bp, Artificial Sequence
  source: /note="Description of Artificial Sequence: Synthetic polynucleotide"
atggctgccgatggttatcttccagattggctcgaggacaacctctctgagggcattcgcgagtggtgggacttgaaacctggagccccgaaacctaaagccaaccagcaaaagcaggacgacggccggggtctggtgcttcctggctacaagtacctcggacccttcaacggactcgacaagggggagcccgtcaacgcggcggacgcagcggccctcgagcacgacaaggcctacgaccagcagctcaaagcgggtgacaatccgtacctgcggtataaccacgccgacgccgagtttcaggagcgtctgcaagaagatacgtcttttgggggcaacctcgggcgagcagtcttccaggccaagaagcgggttctcgaaccttttggtctggttgaggaaggcgctaagacggctcctggaaagaaacgtccggtagagcagtcgccacaagagccagactcctcctcgggcatcggcaagacaggccagcagcccgctaaaaagagactcaattttggtcagactggcgactcagagtcagtccccgacccacaacctctcggagaacctccagcaacccccgctgctgtgggacctactacaatggcttcaggcggtggcgcaccaatggcagacaataacgaaggcgccgacggagtgggtaatgcctcaggaaattggcattgcgattccacatggctgggcgacagagtcatcaccaccagcacccgcacctgggccttgcccacctacaataaccacctctacaagcaaacctccagtgcttcaacgggggccagcaacgacaaccactacttcggctacagcaccccctgggggtattttgatttcaacagattccactgccacttttcaccacgtgactggcagcgactcatcaacaacaattggggattccggcccaagagactcaacttcaagctcttcaacatccaagtcaaggaggtcacgacgaacgatggcgtcacgaccatcgctaataaccttaccagcacggttcaagtcttctcggattcagagtaccaactgccgtacgtcctcggctctgcgcaccagggctgcctccctccgttcccggcggacgtgttcatgattccgcagtacggctacctaacgctcaacaatggcagccaggccgtgggacgttcatccttttactgcctggaatatttcccttctcagatgctgagaacgggcaacaactttaccttcagctacacctttgaggaagtgcctttccacagcagctacgcgcacagccagagcctggaccggctgatgaatcctctcatcgaccaatacctgtattacctgaacagaactcaaaatcagtccggaagtgcccaaaacaaggacttgctgtttagccgtgggtctccagctggcatgtctgttcagcccaaaaactggctacctggaccctgttatcggcagcagcgcgtttctaaaacaaaaacagactacaacaacagcaattttacctggactggtgcttcaaaatataacctcaatgggcgtgaatccatcatcaaccctggcactgctatggcctcacacaaagacgacgaagacaagttctttcccatgagcggtgtcatgatttttggaaaagagagcgccggagcttcaaatactgcattggacaatgtcatgatcacagatgaagaggaaattaaagccactaaccctgtggccaccgaaagatttgggaccgtggcagtcaatttccagagcagcagcacagaccccgcgaccggagatgtgcatgttatgggagccttacctggcatggtgtggcaagacagagacgtatacctgcagggtcccatttgggccaaaattcctcacacggatggacactttcacccgtctcctctcatgggcggctttggacttaagcacccgcctcctcaaatcctcatcaaaaacacgcctgttcctgcgaatcctccggcagagttttcggctacaaagtttgcttcattcatcacccagtactccacaggacaagtgagtgtggaaattgaatgggagctgcagaaagaaaacagcaagcgctggaatcccgaagtgcagtacacatccaattatgcaaaatctgccaacgttgatttcactgtggacaacaatggactttatactgagcctcgccccattggcacccgttaccttacccgtcccttg

SEQ ID NO: 684 - DNA, 2208 bp, Artificial Sequence
  source: /note="Description of Artificial Sequence: Synthetic polynucleotide"
atggctgccgatggttatcctccagattggctcgaggacaacctctctgagggcattcgcgagtggtgggacttgaaacctggagtcccgaaacctaaagccaaccagcaaaagcaggacgacggccggggtctggtgcttcctggctacaagtacctcggacccttcaacggactcgacaagggggagcccgtcaacgcggcggacgcagcggccctcgagcacgacaaggcctacgaccagcagctcaaagcgggtgacaatccgtacctgcggtataaccacgccgacgccgagtttcaggagcgtctgcaagaagatacgtcttttgggggcaacctcgggcgagcagtcttccaggccaagaagcgggttctcgaaccttttggtctggttgaggaaggcgctaagacggctcctggaaagaaacgtccggtagagcagtcgccacaagagccagactcctcctcgggcatcggcaagacaggccagcagcccgctaaaaagagactcaattttggtcagactggcgactcagagtcagtccccgacccacaacctctcggagaacctccagcaacccccgctgctgtgggacctactacaatggcttcaggcggtggcgcaccaatggcagacaataacgaaggcgccgacggagtgggtaatgcctcaggaaattggcattgcgattccacatggctgggcgacagagtcatcaccaccagcacccgcacctgggccttgcccacctacaataaccacctctacaagcaaatctccagtgcttcaacgggggccagcaacgacaaccactacttcggctacagcaccccctgggggtattttgatttcaacagattccactgccacttttcaccacgtgactggcagcgactcatcaacaacaattggggattccggcccaagagactcaacttcaagctcttcaacatccaagtcaaggaggtcacgacgaacgatggcgtcacgaccatcgctaataaccttaccagcacggttcaagtcttctcggattcagagtaccaactgccgtacgtcctcggctctgcgcaccagggctgcctccctccgttcccggcggacgtgttcatgattccgcagtacggctacctaacgctcaacaatggcagccaggccgtgggacgttcatccttttactgcctggaatatttcccttctcagatgctgagaacgggcaacaactttaccttcagctacacctttgaggaagtgcctttccacagcagctacgcgcacagccagagcctggaccggctgatgaatcctctcatcgaccaatacctgtattacctgaacagaactcaaaatcagtccggaagtgcccaaaacaaggacttgctgtttagccgtgggtctccagctggcatgtctgttcagcccaaaaactggctacctggaccctgttatcggcagcagcgcgtttctaaaacaaaaacagacaacaacaacagcaattttacctggactggtgcttcaaaatataacctcaatgggcgtgaatccatcatcaaccctggcactgctatggcctcacacaaagacgacgaagacaagttctttcccatgagcggtgtcatgatttttggaaaagagagcgccggagcttcaaatactgcattggacaatgtcatgatcacagatgaagaggaaattaaagccactaaccctgtggccaccgaaagatttgggaccgtggcagtcaatttccagagcagcagcacagaccccgcgaccggagatgtgcatgttatgggagccttacctggcatggtgtggcaagacagagacgtatacctgcagggtcccatttgggccaaaattcctcacacggatggacactttcacccgtctcctctcatgggcggctttggacttaagcacccgcctcctcaaatcctcatcaaaaacacgcctgttcctgcgaatcctccggcagagttttcggctacaaagtttgcttcattcatcacccagtactccacaggacaagtgagtgtggaaattgaatgggagctgcagaaagaaaacagcaagcgctggaatcccgaagtgcagtacacatccaattatgcaaaatctgccaacgttgatttcactgtggacaacaatggactttatactgagcctcgccccattggcacccgttaccttacccgtcccttg

SEQ ID NO: 685 - DNA, 2196 bp, Artificial Sequence
  source: /note="Description of Artificial Sequence: Synthetic polynucleotide"
atggctgccgatggttatcttccagattggctcgaggacaacctctctgagggcattcgcgagtggtgggacttgaaacctggagccccgaaacctaaagccaaccagcaaaagcaggacgacggccggggtctggtgcttcctggctacaagtacctcggacccttcaacggactcgacaagggggagcccgtcaacgcggcggacgcagcggccctcgagcacgacaaggcctacgaccagcagctcaaagcgggtgacaatccgtacctgcggtataaccacgccgacgccgagtttcaggagcgtctgcaagaagatacgtcttttgggggcaacctcgggcgagcagtcttccaggccaagaagcgggttctcgaaccttttggtctggttgaggaaggcgctaagacggctcctggaaagaaacgtccggtagagcagtcgccacaagagccagactcctcctcgggcatcggcaagacaggccagcagcccgctaaaaagagactcaattttggtcagactggcgactcagagtcagtccccgacccacaacctctcggagaacctccagcaacccccgctgctgtgggacctactacaatggcttcaggcggtggcgcaccaatggcagacaataacgaaggcgccgacggagtgggtaatgcctcaggaaattggcattgcgattccacatggctgggcgacagagtcatcaccaccagcacccgcacctgggccttgcccacctacaataaccacctctacaagcaaatctccagtgcttcaacgggggccagcaacgacaaccactacttcggctacagcaccccctgggggtattttgatttcaacagattccactgccacttttcaccacgtgactggcagcgactcatcaacaacaattggggattccggcccaagagactcaacttcaagctcttcaacatccaagtcaaggaggtcacgacgaacgatggcgtcacgaccatcgctaataaccttaccagcacggttcaagccttctcggattcagagtaccaactgccgtacgtcctcggctctgcgcaccagggctgcctccctccgttcccggcggacgtgttcatgattccgcagtacggctacctaacgctcaacaatggcagccaggccgtgggacgttcatccttttactgcctggaatatttcccttctcagatgctgagaacgggcaacaactttaccttcagctacacctttgaggaagtgcctttccacagcagctacgcgcacagccagagcctggaccggctgatgaatcctctcatcgacccatacctgtattacctgaacagaactcaaaatcagtccggaagtgcccaaaacaaggacttgctgtttagccgtgggtctccagctggcatgtctgttcagcccaaaaactggctacctggaccctgttatcggcagcagcgcgtttctaaaacaaaaacagacaacaacaacagcaattttacctggactggtgcttcaaaatataacctcaatgggcgtgaatccatcatcaaccctggcactgctatggcctcacacaaagacgacgaagacaagttctttcccatgagcggtgtcatgatttttggaaaagagagcgccggagcttcaaatactgcattggacaatgtcatgatcacagatgaagaggaaattaaagccactaaccctgtggccaccgaaagatttgggaccgtggcagtcaatttccagagcagcagcacagaccccgcgaccggagatgtgcatgttatgggagccttacctggcatggtgtggcaagacagagacgtatacctgcagggtcccatttgggccaaaattcctcacacggatggacactttcacccgtctcctctcatgggcggctttggacttaagcacccgcctcctcaaatcctcatcaaaaacacgcctgttcctgcgaatcctccggcagagttttcggctacaaagtttgcttcattcatcacccagtactccacaggacaagtgagtgtggaaattgaatgggagctgcagaaagaaaacagcaagcgctggaatcccgaagtgcagtacacatccaattatgcaaaatctgccaacgttgatttcactgtggacaacaatggactttatactgagcctcgccccattggcacccgttacctt

SEQ ID NO: 686 - DNA, 2208 bp, Artificial Sequence
  source: /note="Description of Artificial Sequence: Synthetic polynucleotide"
atggctgccgatggttatcttccagattggctcgaggacaacctctctgagggcattcgcgagtggtgggacttgaaacctggagccccgaaacctaaagccaaccagcaaaagcaggacgacggccggggtctggtgcttcctggctacaagtacctcggacccttcaacggactcgacaagggggagcccgtcaacgcggcggacgcagcggccctcgagcacgacaaggcctacgaccagcagctcaaagcgggtgacaatccgtacctgcggtataaccacgccgacgccgagtttcaggagcgtctgcaagaagatacgtcttttgggggcaacctcgggcgagcagtcttccaggccaagaagcgggttctcgaaccttttggtctggttgaggaaggcgctaagacggctcctggaaagaaacgtccggtagagcagtcgccacaagagccagactcctcctcgggcatcggcaagacaggccagcagcccgctaaaaagagactcaattttggtcagactggcgactcagagtcagtccccgacccacaacctctcggagaacctccagcaacccccgctgctgtgggacctactacaatggcttcaggcggtggcgcaccaatggcagacaataacgaaggcgccgacggagtgggtaatgcctcaggaaattggcattgcgattccacatggctgggcgacagagtcatcaccaccagcacccgcacctgggccttgcccacctacaataaccacctctacaagcaaatctccagtgcttcaacgggggccagcaacgacaaccactacttcggctacagcaccccctgggggtattttgatttcaacagattccactgccacttttcaccacgtgactggcagcgactcatcaacaacaattggggattccggcccaagagactcaacttcaagctcttcaacatccaagtcaaggaggtcacgacgaacgatggcgtcacgaccatcgctaataaccttaccagcacggttcaagtcttctcggattcagagtaccaactgccgtacgtcctcggctctgcgcaccagggctgcctccctccgttcccggcggacgtgttcatgattccgcagtacggctacctaacgctcaacaatggcagccaggccgtgggacgttcatccttttactgcctggaatatttcccttctcagatgctgagaacgggcaacaactttaccttcagctacacctttgaggaagtgcctttccacagcagctacgcgcacagccagagcctggaccggctgatgaatcctctcatcgaccaatacctgtattacctgaacagaactcaaaatcagtccggaagtgcccaaaacaaggacttgctgtttagccgtgggtctccagctggcatgtctgttcagcccaaaaactggctacctggaccctgttatcggcagcagcgcgtttctaaaacaaaaacagacaacaacaacagcaattttacctggactggtgcttcaaaatataacctcaatgggcgtgaatccatcatcaaccctggcactgctatggcctcacacaaagacgacgaagacaagttctttcccatgagcggtgtcatgatttttggaaaagagagcgccggagcttcaaatactgcattggacaatgtcatgatcacagatgaagaggaaattaaagccactaaccctgtggccaccgaaagatttgggaccgtggcagtcaatttccagagcagcagcacagaccccgcgaccggagatgtgcatgttatgggagccttacctggcatggtgtggcaagacagagacgtatacctgcagggtcccatttgggccaaaattcctcacacggatggacactctcacccgtctcctctcatgggcggctttggacttaagcacccgcctcctcaaatcctcatcaaaaacacgcctgttcctgcgaatcctccggcagagttttcggctacaaagtttgcttcattcatcacccagtactccacaggacaagtgagtgtggaaattgaatgggagctgcagaaagaaaacagcaagcgctggaatcccgaagtgcagtacacatccaattatgcaaaatctgccaacgttgatttcactgtggacaacaatggactttatactgagcctcgccccattggcacccgttaccttacccgtcccttg

SEQ ID NO: 687 - DNA, 2208 bp, Artificial Sequence
  source: /note="Description of Artificial Sequence: Synthetic polynucleotide"
atggctgccgatggttatcttccagattggctcgaggacaacctctctgagggcattcgcgagtggtgggacttgaaacctggagccccgaaacctaaagccaaccagcaaaagcaggacgacggccggggtctggtgcttcctggctacaagtacctcggacccttcaacggactcgacaagggggagcccgtcaacgcggcggacgcagcggccctcgagcacgacaaggcctacgaccagcagctcaaagcgggtgacaatccgtacctgcggtataaccacgccgacgccgagtttcaggagcgtctgcaagaagatacgtcttttgggggcaacctcgggcgagcagtcttccaggccaagaagcgggttctcgaaccttttggtctggttgaggaaggcgctaagacggctcctggaaagaaacgtccggtagagcagtcgccacaagagccagactcctcctcgggcatcggcaagacaggccagcagcccgctaaaaagagactcaattttggtcagactggcgactcagagtcagtccccgacccacaacctctcggagaacctccagcaacccccgctgctgtgggacctactacaatggcttcaggcggtggcgcaccaatggcagacaataacgaaggcgccgacggagtgggtaatgcctcaggaaattggcattgcgattccacatggctgggcgacagagtcatcaccaccagcacccgcacctgggccttgcccacctacaataaccacctctacaagcaaatctccagtgcttcaacgggggccagcaacgacaaccactacttcggctacagcaccccctgggggtattttgatttcaacagattccactgccacttttcaccacgtgactggcagcgactcatcaacaacaattggggattccggcccaagagactcaacttcaagctcttcaacatccaagtcaaggaggtcacgacgaacgatggcgtcacgaccatcgctaataaccttaccagcacggttcaagtcttctcggattcagagtaccaactgccgtacgtcctcggctctgcgcaccagggctgcctccctccgttcccggcggacgtgttcatgattccgcagtacggctacctaacgctcaacaatggcagccaggccgtgggacgttcatccttttactgcctggaatatttcccttctcagatgctgagaacgggcaacaactttaccttcagctacacctttgaggaagtgcctttccacagcagctacgcgcacagccagagcctggaccggctgatgaatcctctcatcgacctatacctgtattacctgaacagaactcaaaatcagtccggaagtgcccaaaacaaggacttgctgtttagccgtgggtctccagctggcatgtctgttcagcccaaaaactggctacctggaccctgttatcggcagcagcgcgtttctaaaacaaaaacagacaacaacaacagcaattttacctggactggtgcttcaaaatataacctcaatgggcgtgaatccatcatcaaccctggcactgctatggcctcacacaaagacgacgaagacaagttctttcccatgagcggtgtcatgatttttggaaaagagagcgccggaacttcaaatactgcattggacaatgtcatgatcacagatgaagaggaaattaaagccactaaccctgtggccaccgaaagatttgggaccgtggcagtcaatttccagagcagcagcacagaccccgcgaccggagatgtgcatgttatgggagccttacctggcatggtgtggcaagacagagacgtatacctgcagggtcccatttgggccaaaattcctcacacggatggacactttcacccgtctcctctcatgggcggctttggacttaagcacccgcctcctcaaatcctcatcaaaaacacgcctgttcctgcgaatcctccggcagagttttcggctacaaagtttgcttcattcatcacccagtactccacaggacaagtgagtgtggaaattgaatgggagctgcagaaagaaaacagcaagcgctggaatcccgaagtgcagtacacatccaattatgcaaaatctgccaacgttgatttcactgtggacaacaatggactttatactgagcctcgccccattggcacccgttaccttacccgtcccttg

SEQ ID NO: 688 - DNA, 2208 bp, Artificial Sequence
  source: /note="Description of Artificial Sequence: Synthetic polynucleotide"
atggctgccgatggttatcttccagattggctcgaggacagcctctctgagggcattcgcgagtggtgggacttgaaacctggagccccgaaacctaaagccaaccagcaaaagcaggacgacggccggggtctggtgcttcctggctacaagtacctcggacccttcaacggactcgacaagggggagcccgtcaacgcggcggacgcagcggccctcgagcacgacaaggcctacgaccagcagctcaaagcgggtgacaatccgtacctgcggtataaccacgccgacgccgagtttcaggagcgtctgcaagaagatacgtcttttgggggcaacctcgggcgagcagtcttccaggccaagaagcgggttctcgaaccttttggtctggttgaggaaggcgctaagacggctcctggaaagaaacgtccggtagagcagtcgccacaagagccagactcctcctcgggcatcggcaagacaggccagcagcccgctaaaaagagactcaattttggtcagactggcgactcagagtcagtccccgacccacaacctctcggagaacctccagcaacccccgctgctgtgggacctactacgatggcttcaggcggtggcgcaccaatggcagacaataacgaaggcgccgacggagtgggtaatgcctcaggaaattggcattgcgattccacatggctgggcgacagagtcatcaccaccagcacccgcacctgggccttgcccacctacaataaccacctctacaagcaaatctccagtgcttcaacgggggccagcaacgacaaccactacttcggctacagcaccccctgggggtattttgatttcaacagattccactgccacttttcaccacgtgactggcagcgactcatcaacaacaattggggattccggcccaagagactcaacttcaagctcttcaacatccaagtcaaggaggtcacgacgaacgatggcgtcacgaccatcgctaataaccttaccagcacggttcaagtcttctcggattcagagtaccaactgccgtacgtcctcggctctgcgcaccagggctgcctccctccgttcccggcggacgtgttcatgattccgcagtacggctacctaacgcccaacaatggcagccaggccgtgggacgttcatccttttactgcctggaatatttcccttctcagatgctgagaacgggcaacaactttaccttcagctacacctttgaggaagtgcctttccacagcagctacgcgcacagccagagcctggaccggctgatgaatcctctcatcgaccaataccagtattacctgaacagaactcaaaatcagtccggaagtgcccaaaacaaggacttgctgtttagccgtgggtctccagctggcatgtctgttcagcccaaaaactggctacctggaccctgttatcggcagcagcgcgtttctaaaacaaaaacagacaacaacaacagcaattttacctggactggtgcttcaaaatataacctcaatgggcgtgaatccatcatcaaccctggcactgctatggcctcacacaaagacgacgaagacaagttctttcccatgagcggtgtcatgatttttggaaaagagagcgccggagcttcaaatactgcattggacaatgtcatgatcacagatgaagaggaaattaaagccactaaccctgtggccaccgaaagatttgggaccgtggcagtcaatttccagagcagcagcacagaccccgcgaccggagatgtgcatgttatgggagccttacctggcatggtgtggcaagacagagacgtatacctgcagggtcccatttgggccaaaattcctcacacggatggacactttcacccgtctcctctcatgggcggctttggacttaagcacccgcctcctcaaatcctcatcaaaaacacgcctgttcctgcgaatcctccggcagagttttcggctacaaagtttgcttcattcatcacccagtactccacaggacaagtgagtgtggaaattgaatgggagctgcagaaagaaaacagcaagcgctggaatcccgaagtgcagtacacatccaattatgcaaaatctgccaacgttgatttcactgtggacaacaatggactttatactgagcctcgccccattggcacccgttaccttacccgtcccttg

SEQ ID NO: 689 - DNA, 2208 bp, Artificial Sequence; identical to SEQ ID NO: 680
  source: /note="Description of Artificial Sequence: Synthetic polynucleotide"

SEQ ID NO: 690 - DNA, 2205 bp, Artificial Sequence
  source: /note="Description of Artificial Sequence: Synthetic polynucleotide"
atggctgccgatggttatcttccagattggctcgaggacactctctctgaaggaataagacagtggtggaagctcaaacctggcccaccaccaccaaagcccgcagagcggcataaggacgacagcaggggtcttgtgcttcctgggtacaagtacctcggacccttcaacggactcgacaagggagagccggtcaacgaggcagacgccgcggccctcgagcacgacaaagcctacgaccggcagctcgacagcggagacaacccgtacctcaagtacaaccacgccgacgcggagtttcaggagcgccttaaagaagatacgtcttttgggggcaacctcggacgagcagtcttccaggcgaaaaagagggttcttgaacctctgggcctggttgaggaacctgttaagacggctccgggaaaaaagaggccggtagagcactctcctgtggagccagactcctcctcgggaaccggaaaggcgggccagcagcctgcaagaaaaagattgaattttggtcagactggagacgcagactcagtacctgacccccagcctctcggacagccaccagcagccccctctggtctgggaactaatacgatggctacaggcagtggcgcaccaatggcagacaataacgagggcgccgacggagtgggtaattcctcgggaaattggcattgcgattccacatggatgggcgacagagtcatcaccaccagcacccgaacctgggccctgcccacctacaacaaccacctctacaaacaaatttccagccaatcaggagcctcgaacgacaatcactactttggctacagcaccccttgggggtattttgacttcaacagattccactgccacttttcaccacgtgactggcaaagactcatcaacaacaactggggattccgacccaagagactcaacttcaagctctttaacattcaagtcaaagaggtcacgcagaatgacggtacgacgacgattgccaataaccttaccagcacggttcaggtgtttactgactcggagtaccagctcccgtacgtcctcggctcggcgcatcaaggatgcctcccgccgttcccagcagacgtcttcatggtgccacagtatggatacctcaccctgaacaacgggagtcaggcagtaggacgctcttcattttactgcctggagtactttccttctcagatgctgcgtaccggaaacaactttaccttcagctacacttttgaggacgttcctttccacagcagctacgctcacagccagagtctggaccgtctcatgaatcctctcatcgaccagtacctgtattacttgagcagaacaaacactccaagtggaaccaccacgcagtcaaggcttcagttttctcgggccggagcgagtgacattcgggaccagtctaggaactggcttcctggaccctgttaccgccagcagcgagtatcaaagacatctgcggataacaacaacagtgaatactcgtggactggagctaccaagtaccacctcaatggcagagactctctggtgaatccgggcccggccatggcaagccacaaggacgatgaagaaaagttttttcctcagagcggggttctcatctttgggaagcaaggctcagagaaaacaaatgtggacattgaaaaggtcatgattacagacgaagaggaaatcaggacaaccaatcccgtggctacggagcagtatggttctgtatctaccaacctccagagaggcaacagacaagcagctaccgcagatgtcaacacacaaggcgttcttccaggcatggtctggcaggacagagatgtgtaccttcaggggcccatctgggcaaagattccacacacggacggacattttcacccctctcccctcatgggtggattcggacttaaacaccctcctccacagattctcatcaagaacaccccggtacctgcgaatccttcgaccaccttcagtgcggcaaagtttgcttccttcatcacacagtactccacgggacaggtcagcgtggagatcgagtgggagctgcagaaggaaaacagcaaacgctggaatcccgaaattcagtacacttccaactacaacaagtctgttaatgtggactttactgtggacactaatggcgtgtattcagagcctcgccccattggcaccagatacctgactcgtaatctg

SEQ ID NO: 691 - protein, 736 aa, Artificial Sequence
  source: /note="Description of Artificial Sequence: Synthetic polypeptide"
MAADGYLPDWLEDNLSEGIREWWALKPGAPQPKANQQHQDNARGLVLPDYKYLGPGNGLDKGEPVNAADVAALEHDKAYDQQLKAGDNPYLKYNHADAEFQERLKEDTSFGGNLGRAVFQAKKRLLEPLGLVEEAAKTAPGKKRPVEQSPQEPDSSAGIGKSGAQPAKKRLNFGQTGDTESVPDPQPIGEPPAAPSGVGSLTMASGGGAPVADNNEGADGVGSSSGNWHCDSQWLGDGVITTSTRTWALPTYNNHLYKQISNSTSGGSSNDNAYFGYSTPWGYFDFNRFHCHFSPRDWQRLINNNWGFRPKRLNFKLFNIQVKEVTDNNGVKTIANNLTSTVQVFTDSDYQLPYVLGSAHEGCLPPFPADVFMIPQYGYLTLNDGSQAVGRSSFYCLEYFPSQMLRTGNNFQFSYEFENVPFHSSYAHSQSLDRLMNPLIDQYLHYLPKTINGSGQNQQTLKFSVAGPSNMAVQGRNYIPGPSYRQQRVSTTVTQNNNSEFAWPGASSWALNGRNSLMNPGPAMASYKEGEDSFFPLSGSLIFGKQGTGRDNVDADKVMITNEEEIKTTNPVATESYGQVATNHQSAQAQAQTGWVQNQGILPGMVWQDRDVYLQGPIWAKIPHTDGNFHPSPLMGGFGMKHPPPQTLIKNTPVPADPPTAFNKDKLNSFITQYSTGQVSVEIEWELQKENSKRWNPEIQYTSNYYKSNNVEFAVNTEGVYSEPRPIGTRYLTRNL

SEQ ID NO: 692 - protein, 736 aa, Artificial Sequence
  source: /note="Description of Artificial Sequence: Synthetic polypeptide"
MAADGYLPDWLEDNLSEGIREWWALKPGAPQPKANQQHQDNARGLVLPGYKYLGPGNGLDKGEPVNAADAAALEHDKAYDQQLKAGDNPYLKYNHADAEFQERLKEDTSFGGNLGRAVFQAKRRLLEPLGLVEEAAKTAPGKKRPVEQSPQEPDSSAGIGKSGAQPAKKRLNFGQTGDTESVPDPQPIGEPPAAPSGVGSLTMASGGGAPVADNNEGADGVGSSSGNWHCDSQWLGDRVITTSTRTWALPTYNNHLYKQISNSTSGGSSNDNAYFGYSTPWGYFDFNRFHCHFSPRDWQRLINNNWGFRPKRLNFKLFNIQIKEVTDNNGVKTIANNLTSTVQVFTDLDYQLPYVLGSAHEGCLPPFPADVFMIPQYGYLTLNDGSQAVGRSSFYCLEYFPSQMLRTGNNFQFSYEFENVPFHSSYAHSQSLDRLMNPLIDQYLHYLSKTINGSGQNQQTLKFSVAGPSNMAVQGRNYIPGPSYRQQRVSTTVTQNNNSEFAWPGASSWALNGRNSLMNPGPAMASYKEGEDSFFPLSGSLIFGKQGTGRDNVDADKVMITNEEEIKTTNPVATESYGQVATNHQSAQAQAQTGWVQNQGILPGMVWQDRDVYLQGPIWAKIPHTDGNFHPSPLMGGFGMKHPPPQTLIKNTPVPADPPTAFNKDKLNSFITQYSTGQVSVEIEWELQKENSKRWNPEIQYTSNYYKSNNVEFAVNTEGVYSEPRPIGTRYLTRNL

SEQ ID NO: 693 - protein, 736 aa, Artificial Sequence
  source: /note="Description of Artificial Sequence: Synthetic polypeptide"
MAADGYLPDWLEDNLSEGIREWWALKPGAPQPKANQQHQDNARGLVLPGYKYLGPGNGLDKGEPVSAADAAALEHDKAYDQQLKAGDNPYLKYNHADAEFQERLKEDTSFGGNLGRAVFQAKKRLLEPLGLVEEAAKTAPGKKRPVEQSPQEPDSSAGIGKSGAQPAKKRLNFGQTGDTESVSDPQPIGEPPAAPSGVGSLTMASGGGAPVADNNEGADGVGSSSGNWHCDSQWLGDRVITTSTRTWALPTYNNHLYKQISNSTSGGSSNDNAYFGYSTPWGYFDFNRFHCHFSPRDWQRLINNNWGFRPKRLNFKLFNIQVKEVTDNNGVKTIANNLTSTVQVFTDSDYQLPYVLGSAHEGCLPPSPADVFMIPQYGYLTLNDGSQAVGRSSFYCLEYFPSQMLRTGNNFQFSYEFENVPFHSSYAHSQSLDRLMNPLIDQYLHYLSKTINGSGQNQQTLKFSVAGPSNMAVQGRNYIPGPSYRQQRVSTTVTQNNNSEFAWPGASSWALNGRNSLMNPGPAMASYKEGEDSFFPLSGSLIFGKQGTGRDDVDADKVIITNEEEIKTTNPVATESYGQVATNHQSAQAQAQTGWVQNQGILPGMVWQDRDVYLQGPIWAKIPHTDGNFHPSPLMGGFGMKHPPPQTLIKNTPVPADPPTAFNKDKLNSFITQYSTGQVSVEIEWELQKENSKRWNPEIQYTSNYYKSNNVEFAVNTEGVYSEPRPIGTRYLTRNL

SEQ ID NO: 694 - protein, 736 aa, Artificial Sequence
  source: /note="Description of Artificial Sequence: Synthetic polypeptide"
MAADGYLPDWLEDNLSEGIREWWALKPGAPQPKANQQHQDNARGLVLPGYKYLGPGNGLDKGEPVNAADAAALEHDKAYDQQLKAGDNPYLKYNHAGAEFQERLKEDTSFGGNLGRAVFQAKKRLLEPLGLVEEAAKTAPGKKRPVEQSPQEPDSSAGIGKSGAQPAKKRLNFGQTGDTESVPDPQPIGEPPAAPSGVGSLTMASGGGAPVADNNEGAGGVGSSSGNWHCDSQWLGDRVVTTSTRTWALPTYNNHLYKQISNSTSGGSSNDNAYFGYSTPWGYFDFNRFHCHFSPRDWQRLINNNWGFRPKRLNFKLFNIQVKEVTDNNGVKTIANNLTSTVQVFTDSDYQLPYVLGSAHGGCLPPFPADVFMIPQYGYLTLNDGSQAVGRSSFYCLEYFPSQMLRTGNNFQFSYEFENVPFHSSYAHSQSLDRLMNPLIDQYLHYLSKTINGSGQNQQTLKFSVAGPSNMAVQGRSYIPGPSYRQQRVSTTVTQNNNSEFAWPGASSWALNGRNSLMNPGPAMASYKEGEDSFFPLSGSLIFGKQGTGRDNVDADKVMITNEEEIKTTNPVATESYGQVATNHQSAQAQAQTGWVQNQGILPGMVWQDRDVYLQGPIWAKIPHTDGNFHPSPLMGGFGMKHPPPQTLIKNTPVPADPPTAFNKDKLNSFITQYSTGQVSVEIEWELQKENSKRWNPEIQYTSNYYKSNNVEFAVNTEGVYSEPRPIGTRYLTRNL

SEQ ID NO: 695 - protein, 736 aa, Artificial Sequence
  source: /note="Description of Artificial Sequence: Synthetic polypeptide"
MAADGYLPDWLEDNLSEGIREWWALKPGAPQPKANQQHQDNARGLVLPGYKYLGPGNGLDKGEPVNAADAAALEHDKAYDQQLKAGDNPYLKYNHADAEFQERLKEDTSFGGNLGRAVFQAKKRLLEPLGLVEEAAKTAPGKKRPVEQSPQEPDSSAGIGKSGAQPAKKRLNFGQTGDTESVPDPQPIGEPPAAPSGVGSLTMASGGGAPVADNNEGADGVGSSSGNWHCDSQWLGDRVVTTSTRTWALPTYNNHLYKQISNSTSGGSSNDNAYFGYSTPWGYFDFNRFHCHFSPRDWQRLINNNWGFRPKRLNFKLFNIQVKEVTDNNGVKTIANNLTSTVQVFTDSDYQLPYVLGSAHEGCLPPFPADVFMIPQYGYLTLNDGSQAVGRSSFYCLEYFPSQMLRTGNNFQFSYEFENVPFHSSHAHSQSLDRLMNPLIDQYLHYLSKTINGSGQNQQTLKFSVAGHSNMAVQGRNYIPGPSYRQQRVSTTVTQNNNSEFAWPGASSWALNGRNSLMNPGPAMASYKEGEDSFFPLSGSLIFGKQGTGRDNVDADKVMITNEEEIKTTNPVATESYGQVATNHQSAQAQAQTGWVQNQGILPGMVWQDRDVYLQGPIWAKIPHTDGNFHPSPLMGGFGMKHPPPQTLIKNTPVPADPPTAFNKDKLNSFITQYSTGQVSVEIGWELQKENSKRWNPEIQYTSNYYKSNNVEFAVNTEGVYSEPRPIGTRYLTRNL

SEQ ID NO: 696 - protein, 736 aa, Artificial Sequence
  source: /note="Description of Artificial Sequence: Synthetic polypeptide"
MAADGYLPDWLEDNLSEGIREWWALKPGAPQPKANQQHQDNARGLVLPGYKYLGPGNGLDKGEPVNAADAAALEHDKAYDQQLKAGDNPYLKYNHADAEFQERLKEDTSFGGNLGRAVFQAKKRLLEPLGLVEEAAKTAPGKKRPVEQSPQEPDSSAGIGKSGAQPAKKRLNFGQTGDTESVPDPQPIGEPPAAPSGVGSLTMASGGGAPVADNNEGADGVGSSSGNWHCDSQWLGDRVITTSTRTWALPTYNNRLYKQISNSTSGGSSNDNAYFGYSTPWGYFDFNRFHCHFSPRDWQRLINNNWGFRPKRLNFKPFNIQVKEVTDNNGVKTIANNLTSTVQVFTDSDYQLPYVLGSAHEGCLPPFPADVFMIPQYGYLTLNDGSQAVGRSSFYCLEYFPSQMLRTGNNFQFSYEFENVPFHSSYAHSQSLDRLMNPLIDQYLHYLSKTINGSGQNQQTLKFSVAGPSNMAVQGRNYIPGPSYRQQRVSTTVTQNNNSEFAWPGASSWALNGRNSLMNPGPAMASYKEGEDSFFPLSGSLIFGKQGTGRDNVDADKVMITNEEEIKTTNPVATESYGQVATNHQSAQAQAQTGWVQNQGILPGMVWQDRDVYLQGPIWAKIPHTDGNFHPSPLMGGFGMKHPPPQTLIKNTPVPADPPTAFNKDKLNSFITQYSTGQVSVEIEWELQKENSKRWNPEIQYTSNYYKSNNVEFAVNTEGVYSEPRPIGTRYLTRNL

SEQ ID NO: 697 - protein, 736 aa, Artificial Sequence
  source: /note="Description of Artificial Sequence: Synthetic polypeptide"
MAADGYLPDWLEDNLSEGIREWWALKPGAPQPKANQQHQDNARGLVLPGYKYLGPGNGLDKGEPVNAADAAALEHDKAYDQQLKAGDNPYLKYNHADAEFQERLKEDTSFGGNLGRAVFQAKKRLLEPLGLVEEAAKTAPGKKRPVEQSPQEPDSSAGIGKSGAQPAKKRLNFGQTGDTESVPDPQPIGEPPAAPSGVGSLTMASGGGAPVADNNEGADGVGSSSGNWHCDSQWLGDRVITTSTRTWALPTYNNHLYKQISNSTSGGSSNDNAYFGYSTPWGYFDFNRFHCHFSPRDWQRLINNNWGFRPKRLNFKLFNIQVKEVTDNNGVKTIANNLTSTVQVFTDSDYQLPYVLGSAHEGCLPPFPADVFMIPQYGYLTLNDGSQAVGRSSFYCLEYFPSQMLRTGNNFQFSYEFENVPFHSSYAHSQSLDRLMNPLIDQYLHYLSKTINGSGQNQQTLKFSVAGPSNMAVQGRNYIPGPSYRQQRVSTTVTQNNNSEFAWPGASSWALNGRNSLMNPGPAMASYKEGEDSFFPLSGSLIFGKQGTGRDNVDADKVMITNEEEIKTTNPVATESYGQVATNHQSAQAQAQTGWVQNQGILPGMVWQDRDVYLQGPIWAKIPHTDGNFHPSPLMGGFGMKHPPPQTLIKNTPVPADPPTAFNKDKLNSFITQYSTGQVSVEIEWELQKENSKRWNPEIQYTSNYYKSNNVEFAVNTEGVYSEPRPIGTRYLTRNL

SEQ ID NO: 698 - protein, 736 aa, Artificial Sequence; identical to SEQ ID NO: 697
  source: /note="Description of Artificial Sequence: Synthetic polypeptide"

SEQ ID NO: 699 - protein, 736 aa, Artificial Sequence
  source: /note="Description of Artificial Sequence: Synthetic polypeptide"
MAADGYLPDWLEDNLSEGIREWWDLKPGAPKPKANQQKQDDGRGLVLPGYKYLGPFNGLDKGEPVNAADAAALEHDKAYDQQLKAGDNPYLRYNHADAEFQERLQEDTSFGGNLGRAVFQAKKRVLEPFGLVEEGAKTAPGKKRPVEQSPQEPDSSSGIGKSGQQPAKKRLNFGQTGDSESVPDPQPLGEPPATPAALGPTTMASGGGAPMADNNEGADGVGNASGNWHCDSTWLGDRVITTSTRTWALPTYNNHLYKQISSASTGASNDNHYFGYSTPWGYFDFNRFHCHFSPRDWQRLINNNWGFRPKRLNFKLFNIQVKEVTTNDGVTTIANNLTSTVQVFSDSEYQLPYVLGSAHQGCLPPFPADVFMIPQYGYLTLNNGSKAVGRSSFYCLEYFPSQMLRTGNNFTFSYTFEEVPFHSSYAHSQSLDRLMNPLIDQYLYYLNRTQNQSGSAQNKDLLFSRGSPAGMSVQPKNWLPGPCYRQQRVSKTKTDNNNSNFTWTGASKYNLNGRESIINPGTAMASHKDDEDKFFPMSGVMIFGKESAGASNTALDNVMITDEEEIKATNPVATERFGTVAVNFQSSSTDPATGDVHVMGALPGMVWQDRDVYLQGPIWAKIPHTDGHFHPSPLMGGFGLKHPPPQILIKNTPVPANPPAEFSATKFASFITQYSTGQVSVEIEWELQKENSKRWNPEVQYTSNYAKSANVDFTVDNNGLYTEPRPIGTRYLTRPL

SEQ ID NO: 700 - protein, 736 aa, Artificial Sequence
  source: /note="Description of Artificial Sequence: Synthetic polypeptide"
MAADGYLPDWLEDNLSEGIREWWDLKPGAPKPKANQQKQDDGRGLVLPGYKYLGPFNGLDKGEPVNAADAAALEHDKAYDQQLKAGDNPYLRYNHADAEFQERLQEDTSFGGNLGRAVFQAKKRVLEPLGLVEEGAKTAPGKKRPVEQSPQEPDSSSGIGKTGQQPAKKRLNFGQTGDSESVPDPQPLGEPPATPAAVGPTTMASGGGAPMADNNEGADGVGNASGNWHCDSTWLGDRVITTSTRTWALPTYNNHLYKQISSTSTGASNDNHYFGYSTPWGYFDFNRFHCHFSPRDWQRLINNNWGFRPKRLNFKLFNIQVKEVTTNDGVTTIANNLTSTVQVFSDSEYQLPYVLGSAHQGCLPPFPADVFMIPQYGYLTLNNGSQAVGRSSFYCLEYFPSQMLRTGNNFTFSYTFEEVPFHSSYAHSQSLDRLMNPLIDQYLYYLNRTQNQSGSAQNKDLLFSRGSPAGMSVQPKNWLPGPCYRQQRVSKTKTDNNNSNFTWTGASKYNLNGRESIINPGTAVASHKDDEDKFFPMSGVMIFGKESAGASNTALDNVMITDEEEIKATNPVATERFGTVAVNFQSSSTDPATGDVHAMGALPGMVWQDRDVYLQGPIWAKIPHTDGHFHPSPLMGGFGLKNPPPQILIKNTPVPANPPAEFSATKFASFITQYSTGQVSVEIEWELQKENSKRWNPEVQYTSNYAKSANVDFTVDNNGLYTEPRPIGTRYLTRPL

SEQ ID NO: 701 - protein, 736 aa, Artificial Sequence
  source: /note="Description of Artificial Sequence: Synthetic polypeptide"
MAADGYLPDWLEDNLSEGIREWWALKPGAPQPKANQQHQDNARGLVLPGYKYLGPGNGLDKGEPVNAADAAALEHDKAYDQQLKAGDNPYLKYNHADAEFQERLKEDTSFGGNLGRAVFQAKKRLLEPLGLVEEAAKTAPGKKRPVEQSPQEPDSSAGIGKSGAQPAKKRLNFGQTGDTESVPDPQPIGEPPAAPSGVGSLTMASGGGAPVADNNEGADGVGSSSGNWHCDSQWLGDRVITTSTRTWALPTYNNHLYKQISNSTSGGSSNDNAYFGYSTPWGYFDFNRFHCHFSPRDWQRLINNNWGFRPKRLNFKLFNIQVKEVTDNNGVKTIANNLTSTVQVFTDSDYQLPYVLGSAHEGCLPPFPADVFMIPQYGYLTLNDGSQAVGRSSFYCLEYFPSQMLRTGNNFQFGYEFENVPFHSSYAHSQSLDRLMNPLIDQYLYYLSKTINGSGQNQQTLKFSVAGPSNMAVQGRNYIPGPSYRQQRVSTTVTQNNNSEFAWPGASSWALNGRNSLMNPGPAMASHKEGEDRFFPLSGSLIFGKQGTGRDNVDADKVMITNEEEIKTTNPVATESYGQVATNHQSAQAQAQTGWVQNQGILPGMVWQDRDVYLQGPIWAKIPHTDGNFHPSPLMGGFGMKHPPPQILIKNTPVPADPPTAFNKDKLNSFITQYSTGQVSVEIEWELQKENSKRWDPEIQYTSNYYKSNNVEFAVNTEGVYSEPRPIGTRYLTRNL

SEQ ID NO: 702 - protein, 736 aa, Artificial Sequence
  source: /note="Description of Artificial Sequence: Synthetic polypeptide"
MAADGYLPDWLEDNLSEGIREWWALKPGAPQPKANQQHQDNARGLVLPGYKYLGPGNGLDKGEPVNAADAAALEHDKAYDQQLKAGDNPYLKYNHADAEFQERLKEDTSFGGNLGRAVFQAKKRLLEPLGLVEEAAKTAPGKKRPVEQSPQEPDSSAGIGKSGAQPAKKRLNFGQTGDTESVPDPQPIGEPPAAPSGVGSLTMASGGGAPVADNNEGADGVGSSSGNWHCDSQWLGDRVITTSTRTWALPTYNNHLYKQISNSTSGGSSNDNAYFGYSTPWGYFDFNRFHCRFSPRDWQRLINNNWGFRPKRLNFKLFNIQVKEVTDNNGVKTIANNLTSTVQVFTDSDYQLPYVLGSAHEGCLPPFPADVFMIPQYGYLTLNDGSQAVGRSSFYCLEYFPSQMLRTGNNFQFSYEFENVPFHSSYAHSQSLDRLMNPLIDQYLYYLSKTINGSGQNQQTLKFSVAGPSNMAVQGRNYIPGPSYRQQRVSTTVTQNNNSEFAWPGASSWALNGRNSLMNPGPAMASHKEGEDRFFPLSGSLIFGKQGTGRDNVDADKVMITNEEEIKTTNPVATESYGQVATNHQSAQAQAQTGWVQNQGILPGMVWQDRDVYLQGPIWAKIPHTDGNFHPSPLMGGFGMKHPPPQILIKNAPVPADPPTAFNKDKLNSFITQYSTGQVSVEIEWELQKENSKRWNPEIQYTSNYYKSNNVEFAVNTEGVYSEPRPIGTRYLTRNL

SEQ ID NO: 703 - protein, 736 aa, Artificial Sequence
  source: /note="Description of Artificial Sequence: Synthetic polypeptide"
MAADGYLPDWLEDNLSEGIREWWALKPGAPQPKANQQHQDNARGLVLPGYKYLGPGNGLDKGEPVSAADAAALEHDKAYDQQLKAGDNPYLKYNHADAEFQERLKEDTSFGGNLGRAVFQAKKRLLEPLGLVEEAAKTAPGKKRPVEQSPQEPDSSAGIGKSGAQPAKKRLNFGQTGDTESVPDPQPIGEPPAAPSGVGSLTMASGGGAPVADNNEGADGVGSSSGNWHCDSQWLGDRVITTSTRTWALPTYNNHLYKQISNSTSGGSSNDNAYFGYSTPWGYFDFNRFHCHFSPRDWQRLINNNWGFRPKRLNFKLFNIQVKEVTDNNGVKTIANNLTSTVQVFTDSDYQLPYVLGSAHEGCLPPFPADVFMIPQYGYLTLNDGSQAVGRSSFYCLEYFPSQMLRTGNNFQFSYEFENVPFHSSYAHSQSLDRLMNPLIDQYLYYLSKTINGSGQNQQTLKFSVAGPSNMAVQGRNYIPGPSYRQQRVSTTVTQNNNSEFAWPGASSWALNGRNSLMNPGPAMASHKEGEDRFFPLSGSLIFGKQGTGRDNVDADKVMITNEEEIKTTNPVATESYGQVATNHQSAQAQAQTGWVQNQGILPGMVWQDRDVYLQGPIWAKIPHTDGNFHPSPLMGGFGMKHPPPQILIKNTPVPADPPTAFNKDKLNSFITQYSTGQVSVEIEWELQKENSKRWNPEIQYTSNYYKSNNVEFAVNTEGVYSEPRPIGTRYLTRNL

SEQ ID NO: 704 - protein, 736 aa, Artificial Sequence
  source: /note="Description of Artificial Sequence: Synthetic polypeptide"
MAADGYLPDWLEDNLSEGIREWWALKPGAPQPKANQQHQDNARGLVLPGYKYLGPGNGLDKGEPVNAADAAALEHDKAYDQQLKAGDNPYLKYNHADAEFQERLKEDTSFGGNLGRAVFQAKKRLLEPLGLVEEAAKTAPGKKRPVEQSPQEPDSSAGIGKSGAQPAKKRLNFGQTGDTESVPDPQPIGEPPAAPSGVGSLTMASGGGAPVADNNEGADGVGSSSGNWHCDSQWLGDRVITTSTRTWALPTYNNHLYKQISNSTSGGSSNDNAYFGYSTPWGYFDFNRFHCHFSPRDWQRLINNNWGFRPKRLNFKLFNIQVKEVTDNNGVKTIANNLTSTVQVFTDSDYQLPYVLGSAHEGCLPPFPADVFMIPQYGYLTLNDGSQAVGRSSFYCLEYFPSQMLRTGNNFQFSYEFENVPFHSSYAHSQSLDRLMNPLIDQYLYYLSKTINGSGQNQQTLKFSVAGPSNTAVQGRNYIPGPSYRQQRVSTTVTQNNNSEFAWPGASSWALNGRNSLMNPGPAMASHKEGEDRFFPLSGSLIFGKQGTGRDNVDADKVMITNEEEIKTTNPVATESYGQVATNHQSAQAQAQTGWVQNQGILPGMVWQDRDVYLQGPIWAKIPHTDGNFHPSPLMGGFGMKHPPPQILIKNTPVPADPPTAFNKDKLNSFITQYSTGQVSVEIEWELQKENSKRWNPEIQYTSNYYKSNNVEFAVNTEGVYSEPRPIGTRYLTRNL

SEQ ID NO: 705 - protein, 736 aa, Artificial Sequence
  source: /note="Description of Artificial Sequence: Synthetic polypeptide"
MAADGYLPDWLEDNLSEGIREWWALKPGAPQPKANQQHQDNARGLVLPGYKYLGPGNGLDKGEPVNAADAAALEHDKAYDQQLKAGDNPYLKYNHADAEFQERLKEDTSFGGNLGRAVFQAKKRLLEPLGLVEEAAKTAPGKKRPVEQSPQEPDSSAGIGKSGAQPAKKRLNFGQTGDTESVPDPQPIGEPPAAPSGVGSLTMASGGGAPVADNNEGADGVGSSSGNWHCDSQWLGDRVITTSTRTWALPTYNNHLYKQISNSTSGGSSNDNAYFGYSTPWGYFDFNRFHCHFSPRDWQRLINNNWGFRPKRLNFKLFNIQVKEVTDNNGVKTIANNLTSTVQVFTDSDYQLPYVLGSAHEGCLPPFPADVFMIPQYGYLTLNDGSQAVGRSSFYCLEYFPSQMLRTGSNFQFSYEFENVPFHSSYAHSQSLDRLMNPLIDQYLYYLSKTINGSGQNQQTLKFSVAGPSNMAVQGRNYIPGPSYRQQRVSTTVTQNNNSEFAWPGASSWALNGRNSLMNPGPAMASHKEGEDRFFPLSGSLIFGKQGTGRDNVDADKVMITNEEEIKTTNPAATESYGQVATNHQSAQAQAQTGWVQNQGILPGMVWQDRDVYLQGPIWAKIPHTDGNFHPSPLMGGFGMKHPPPQILIKNTPVPADPPTAFNKDKLNSFITQYSTGQVSVEIEWELQKENSKRWNPEIQHTSNYYKSNNVEFAVNTEGVYSEPRPIGTRYLTRNL

SEQ ID NO: 706 - protein, 736 aa, Artificial Sequence
  source: /note="Description of Artificial Sequence: Synthetic polypeptide"
MAADGYLPDWLEDNLSEGIREWWALKPGAPQPKANQQHQDNARGLVLPGYKYLGPGNGLDKGEPVNAADAAALEHDKAYDQQLKAGDNPYLKYNHADAEFQERLKEDTSFGGNLGRAVFQAKKRLLEPLGLVEEAAKTAPGKKRPVEQSPQEPDSSAGIGKSGAQPAKKRLNFGQTGDTESVPDPQPIGEPPAAPSGVGSLTMASGGGAPVADNNEGADGVGSSSGNWHCDSQWLGDRVITTSTRTWALPTYNNHLYKQISNSTSGGSSNDNAYFGYSTPWGYFDFNRFHCHFSPRDWQRLINNNWGFRPKRLNFRLFNIQVKEVTDNNGVKTIANNLTSTVQVFTDSDYQLPYVLGSAHEGCLPPFPADVFMIPQYGYLTLNDGSQAVGRSSFYCLEYFPSQMLRTGNNFQFSYEFENVPFHSSYAHSQSLDRLMNPLIDQYLYYLSKTINGSGQNQQTLKFSVAGPSNMAVQGRNYIPGPSYRQQRVSTTVTQNNNSEFAWPGASSWALNGRNSLMNPGPAMASHKEGEDRFFPLSGSLIFGKQGTGRDNVDADKVMITNEEEIKTTNPVATESYGQVATNHQSAQAQAQTGWVQSQGILPGMVWQDRDVYLQGPIWAKIPHTDGNFHPSPLMGGFGMKHPPPQILIKNTPVPADPPTAFNKDKLNSFITQYSTGQVSVEIEWELQKENSKRWNPEIQYTSNYYKSNNVEFAVNTEGVYSEPRPIGTRYLTRNL

SEQ ID NO: 707 - protein, 735 aa, Artificial Sequence
  source: /note="Description of Artificial Sequence: Synthetic polypeptide"
MAADGYLPDWLEDNLSEGIREWWALKPGAPQPKANQQHQDNARGLVLPGYKYLGPGNGLDKGEPVNAADAAALEHDKAYDQQLKAGDNPYLKYNHADAEFQERLKEDTSFGGNLGRAVFQAKKRLLEPLGLVEEAAKTAPGKKRPVEQSPQEPDSSAGIGKSGAQPAKKRLNFGQTGDTESVPDPQPIGEPPAAPSGVGSLTMASGGGAPVADNNEGADGVGSSSGNWHCDSQWLGDRVITTSTRTWALPTYNNHLYKQISNSTSGGSSNDNAYFGYSTPWRYFDFNRFHCHFSPRDWQRLINNWGFRPKRLNFKLFNIQVKEVTDNNGVKTIANNLTSTVQAFTDSDYQLPYVLGSAHEGCLPPFPADVFMIPQYGYLTLNDGSQAVGRSSFYCLEYFPSQMLRTGNNFQFSYEFENVPFHSSYAHSQSLDRLMNPLIDQYLYYLSKTINGSGQNQQTLKFSVAGPSNMAVQGRNYIPGPSYRQQRVSTTVTQNNNSEFAWPGASSWALNGRNSLMNPGPAMASHKEGEDRFFPLSGSLIFGKQGTGRDNVDADKVMITNEEEIKTTNPVATESYGQVATNHQSAQAQAQTGWVQNQGILPGMVWQDRDVYLQGPIWAKIPHTDGNFHPSPLMGGFGMKHPPPQILIKNTPVPADPPTAFNKDELNSFITQYSTGQVSVEIEWELQKENSKRWNPEIQYTSNYYKSNNVEFAVNTEGVYSEPRPIGTRYLTRNL

SEQ ID NO: 708 - protein, 735 aa, Artificial Sequence
  source: /note="Description of Artificial Sequence: Synthetic polypeptide"
MAADGYLPDWLEDNLSEGIREWWALKPGAPQPKANQQHQDNARGLVLPGYKYLGPGNGLDKGEPVNAADAAALEHDKAYDQQLKAGDNPYLKYNHADAEFQERLKEDTSFGGNLGRAVFQDKKRLLEPLGLVEEAAKTAPGKKRPVEQSPQEPDSSAGIGKSGAQPAKKRLNFGQTGDTESVPDPQPIGEPPAAPSGVGSLTMASGGGAPVADNNEGADGVGSSSGNWHCDSQWLGDRVITTSTRTWALPTYNNHLYKQISNSTSGGSSNDNAYFGYSTPWGYFDFNRFHCHFSPRDWQRLINNWGFRPKRLNFKLFNIQVKEVTDNNGVKTIANNLTSTVQVFTDSDYQLPYVLGSAHEGCLPPFPADVFMIPQYGYLTLNDGSQAVGRSSFYCLEYFPSQMLRTGNNFQFSYEFENVPFHSSYAHSQSLDRLMNPLIDQYLYYLSKTINGSGQNQQTLKFSVAGPSNMAVQGRNYIPGPSYRQQRVSTTVTQNNNSEFAWPGASSWALNGRNSLMNPGPAMASHKEGEDRFFPLSGSLIFGKQGTGRDNVDADKVMITNEEEIKTTNPVATESYGQVATNHQSAQAQAQTGWVQNQGILPGMVWQDRDVYLQGPIWAKIPHTDGNFHPSPLMGGFGMKHPPPQILIKNTPVPADPPTAFNKDKLNSFITQYSTGQVSVEIEWELQKENSKRWNPEIQYTSNYYKSNNVEFAVNTEGVYSEPRPIGTRYLTRNL

SEQ ID NO: 709 - protein, 736 aa, Artificial Sequence
  source: /note="Description of Artificial Sequence: Synthetic polypeptide"
MAADGYLPDWLEDNLSEGIREWWALKPGAPQPKANQQHQDNARGLVLPGYKYLGPGNGLDKGEPVNAADAAALEHDKAYDQQLKAGDNPYLKYNHADAEFQERLKEDTSFGGNLGRAVFQAKKRLLEPLGLVEEAAKTAPGKKRPVEQSPQEPDSSAGIGKSGAQPAKKRLNFGQTGDTESVPDPQPIGEPPAAPSGVGSLTMASGGGAPVADNNEGADGVGSSSGNWHCDSQWLGDRAITTSTRTWALPTYNNHLYKQISNSTSGGSSNDNAYFGYSTPWGYFDFNRFHCHFSPRDWQRLINNNWGFRPKRLNFKLFNIQVKEVTDNNGVKTIANNLTSTVQVFTDSDYQLPYVLGSAHEGCLPPFPADVFMIPQYGYLTLNDGSQAVGRSSFYCLEYFPSQMLRTGNNFQFSYEFENVPFHSSYAHSQSLDRLMNPLIDQYLYYLSKTINGSGQNQQTLKFSVAGPSNMAVQGRNYIPGPSYRQQRVSTTVTQNNNSEFAWPGASSWALNGRNSLMNPGPAMASHKEGEDRFFPLSGSLIFGKQGTGRDNVDADKVMTTNEEEIKTTNPVATESYGQVATNHQSAQAQAQTGWVQNQGILPGMVWQDRDVYLQGPIWAKIPHTDGNFHPSPLMGGFGMKHPPPQILIKNTPVPADPPTAFNKDKLNSFITQYSTGQVSVEIEWELQKENSKRWNPEIQYTSNYYKSNNVEFAVNTEGVYSEPRPIGTRYLTRNL

SEQ ID NO: 710 - protein, 736 aa, Artificial Sequence
  source: /note="Description of Artificial Sequence: Synthetic polypeptide"
MAADGYLPDWLEDNLSEGIREWWALKPGAPQPKANQQHQDNARGLVLPGYKYLGPGNGLDKGEPVNAADAAALEHDKAYDQQLKAGDNPYLKYNHADAEFQERLKEDTSFGGNLGRAVFQTKKRLLEPLGLVEEAAKTAPGKKRPVEQSPQEPGSSAGIGKSGAQPAKKRLNFGQTGDTESVPDPQPIGEPPAAPSGVGSLTMASGGGAPVADNNEGADGVGSSSGNWHCDSQWLGDRVITTSTRTWALPTYNNHLYKQISNSTSGGSSNDNAYFGYSTPWGYFDFNRFHCHFSPRDWQRLINNNWGFRPKRLNFKLFNIQVKEVTDNNGVKTIANNLTSTVQVFTDSDYQLPYVLGSAHEGCLPPFPADVFMIPQYGYLTLNDGSQAVGRSSFYCLEYFPSQMLRTGNNFQFSYEFENVPFHSSYAHSQSLDRLMNPLIDQYLHYLSKTINGSGQNQQTLKFSVAGPSNMAVQGRNYIPGPSYRQQRVSTTVTQNNNSEFAWPGASSWALNGRNSLMNPGPAMASHKEGEDRFFPLSGSLIFGKQGTGRDNVDADKVMITNEEEIKTTNPVATESYGQVATNHQSAQAQAQTGWVQNQGILPGMVWQDRDVYLQGPIWAKIPHTDGNFHPSPLMGGFGMKHPPPQILIKNTPVPADPPTAFNKDKLNSFITQYSTGQVSVEIEWELQKENSKRWNPEIQYTSNYYKSNNVEFAVNTEGVYSEPRPIGTRYLTRNL

SEQ ID NO: 711 - protein, 736 aa, Artificial Sequence
  source: /note="Description of Artificial Sequence: Synthetic polypeptide"
MAADGYFPDWLEDNLSEGIREWWALKPGAPQPKANQQHQDNARGLVLPGYKYLGPGNGLDKGEPVNAADAAALEHDKAYDQQLKAGDNPYLKYNHADAEFQERLKEDTSFGGNLGRAVFQAKKRLLEPLGLVEEAAKTAPGKKRPVEQSPQEPDSSAGIGKSGAQPAKKRLNFGQTGDTESVPDPQPIGESPAAPSGVGSLTMASGGGAPVADNNEGADGVGSSSGNWHCDSQWLGDRVITTSTRTWALPTYNNHLYKQISNSTSGGSSNDNAYFGYSTPWGYFDFNRFHCHFSPRDWQRLINNNWGFRPKRLNFKLFNIQVKEVTDNNGVKTIANNLTSTVQVFTDSDYQLPYVLGSAHEGCLPPFPADVFMIPQYGYLTLNDGSQAVGRSSFYCLEYLPSQMLRTGNNFQFSYEFENVPFHSSYAHSQSLDRLMNPLIDQYLHYLSKTINGSGQNQQTLKFSVAGPSNMAVQGRNYIPGPSYRQQRVSTTVTQNNNSEFAWPGASSWALNGRNSLMNPGPAVASHKEGEDRFFPLSGSLIFGKQGTGRDNVDADKVMITNEEEIKTTNPVATESYGQVATNHQSAQAQAQTGWVQNQGILPGMVWQDRDVYLQGPIWAKIPHTDGNFHPSPLMGGFGMKHPPPQILIKNTPVPADPPTAFNKDKLNSFITQYSTGQVSVEIEWELQKENSKRWNPEIQYTSNYYKSNNVEFAVNTEGVYSEPRPIGTRYLTRNL

SEQ ID NO: 712 - protein, 736 aa, Artificial Sequence
  source: /note="Description of Artificial Sequence: Synthetic polypeptide"
MAADGYLPDWLEDNLSEGIREWWALKPGAPQPKANQQHQDNARGLVLPGYKYLGPGNGLDKGEPVNAADAAALEHDKAYDQQLKAGDNPYLKYNHADAEFQERLKEDTSFGGNLGRAVFQAKKRLLEPLGPVEEAAKTAPGKKRPVEQSPQEPDSSAGIGKSGAQPAKKRLNFGQTGDTESVPDPQPIGEPPAAPSGVGSLTMASGGGAPVADNNEGADGVGSSSGNWHCDSQWLGDRVITTSTRTWALPTYNNHLYKQISNSTSGGSSNDNAYFGYSTPWGYFDFNRFHCHFSPRDWQRLINNNWGFRPKRLNFKLFNIQVKEVTDNNGVKTIANNLTSTVQVFTDSDYQLPYVLGSAHEGCLPPFPADVFMIPQYGYLTLNDGSQAVGRSSFYCLEYFPSQMLRTGNNFQFSYEFENVPFHSSYAHSQSLDRLMNPLIDQYLYYLSKTINGSGQNQQTLKFSVAGPSNMAVQGRNYIPGPSYRQQRVSTTVTQNNNSEFAWPGASSWALNGRNSLMNPGPAMASHKEGEDRFFPLSGSLIFGKQGTGRDNVDADKVMITNEEEIKTTNPVATESYGQAATNHQSAQAQAQTGWVQNQGILPGMVWQDRDVYLQGPIWAKIPHTDGNFHPSPLMGGFGMKHPPPQILIKNTPVPADPPTAFNKDKLNSFITQYSTGQVSVEIEWELQKENSKRWNPEIQYTSNYYKSNNVEFAVNTEGVYSEPRPIGTRYLTRNL

SEQ ID NO: 713 - protein, 736 aa, Artificial Sequence
  source: /note="Description of Artificial Sequence: Synthetic polypeptide"
MAADGYLPDWLEDNLSEGIREWWALKPGAPQPKANQQHQDNARGLVLPGYKYLGPGNGLDKGEPVNAADAAALEHDKAYDQQLKAGDNPYLKYNHADAEFQERLKEDTSFGGNLGRAVFQAKKRLLEPLGPVEEAAKTAPGKKRPVEQSPQEPDSSAGIGKSGAQPAKKRLNFGQTGDTESVPDPQPIGEPPAAPSGVGSLTMASGGGAPVADNNEGADGVGSSSGNWHCDSQWLGDRVITTSTRTWALPTYNNHLYKQISNSTSGGSSNDNAYFGYSTPWGYFDFNRFHCHFSPRDWRRLINNNWGFRPKRLNFKLFNIQVKEVTDNNGVKTIANNLTSTVQVFTDSDYQLPYVLGSAHEGCLPPFPADVFMIPQYGYLTLNDGSQAVGRSSFYCLEYFPSQMLRTGNNFQFSYEFENVPFHSSYAHSQSLDRLMNPLIDQYLYYLSKTINGSGQNQQTLKFSVAGPSNMAVQGRNYIPGPSYRQQRVSTTVTQNNNSEFAWPGASSWALNGRNSLMNPGPAMASHKEGEDRFFPLSGSLIFGKQGTGRDNVDADKVMITNEEEIKTTNPVATESYGQVATNHQSAQAQAQTGWVQNQGILPGMVWQDRDVYLQGPIWAKIPHTDGNFHPSPLMGGFGMKHPPPQILIKNTPVPADPPTAFNKDKLNSFITQYSTGQVSVEIEWELQKENSKRWNPEIQYTSNYYKSNNVEFAVNTEGVYSEPRPIGTRYLTRNL

SEQ ID NO: 714 - protein, 736 aa, Artificial Sequence
  source: /note="Description of Artificial Sequence: Synthetic polypeptide"
MAADGYLPDWLEDNLSEGIREWWALKPGAPQPKANQQHQDNARGLVLPGYKYLGPGNGLDKGEPVNAADAAALEHDKAYDQQLKAGDNLYLKYNHADAEFQERLKEDTSFGGNLGRAVFQAKKRLLEPLGLVEEAAKTAPGKKRPVEQSPQEPDSSAGIGKSGAQPAKKRLNFGQTGDTESVPDPQPIGEPPAAPSGVGSLTMASGGGAPVADNNEGADGVGSSSGNWHCDSQWLGDRVITTSTRTWALPTYNNHLYKQISNSTSGGSSNDNAYFGYSTPWGYFDFNRFHCHFSPRDWQRLINNNWGFRPKRLNFKLFNIQVKEVTDNNGVKTIANNLTSTVQVFTDSDYQLPYVLGSAHEGCLPPFPADVFMIPQYGYLTLNDGSQAVGRSSFYCLEYFPSQMLRTGNNFQFSYEFENVPFHSSYAHSQSLDRLMNPLIDQYLHYLSKTINGSGQNQQTLKFSVAGPSNMAVQGRNYIPGPSYRQQRVSTTVTQNNNSEFAWPGASSWALNGRNSLMNPGPAMASHKEGEDRFFPLSGSLIFGKQGTGRDNVDADKVMITNEEEIKTTNPVATESYGQVATNHQSAQAQAQTGWVQNQGILPGMVWQDRDVYLQGPIWAKIPHTDGNFHPSPLMGGFGMKHPPPQILIKNTPVPADPPTAFNKDKLNSFITQYSTGQVSVEIEWELQKENSKRWNPEIQYTSNYYKSNNVEFAVNTEGVYSEPRPIGTRYLTRNL

SEQ ID NO: 715 - protein, 736 aa, Artificial Sequence
  source: /note="Description of Artificial Sequence: Synthetic polypeptide"
MAADGYLPDWLEDNLSEGIREWWALKPGAPQPKANQQHQDNARGLVLPGYKYLGPGNGLDKGEPVNAADAAALEHDKAYDQQLKAGDNPYLKYNHADAEFQERLKEDTSFGGNLGRAVFQAKKRLLEPLGLVEEAAKTAPGKKRPVEQSPQEPDSSAGIGKSGAQPAKKRLNFGQTGDTESVPDPQPIGEPPAAPSGVGSLTMASGGGAPVADNNEGADGVGSSSGNWHCDSQWLGDRVITTSTRTWALPTYNNHLYKQISNSTSGGSSNDNAYFGYSTPWGYFDFNRFHCHFSPRDWQRLINNNWGFRPKRLNFKLFNIQVKEVTDNNGVKTIANNLTSTVQVFTDSDYQLPYVLGSAHEGCLPPFPADVFMIPQYGYLTLNDGSQAVGRSSFYCLEYFPSQMLRTGNNFQFSYEFENVPFHSSYAHSQSLDRLMNPLIDQYLHYLSKTINGSGQNQQTLKFSVAGPSNMAVQGRNYIPGPSYRQQRVSTTVTQNNNSEFAWPGASSWALNGRNSLMNPGPAMASHKEGEDRFFPLSGSLIFGKQGTGRDNVDADKVMITNEEEIKTTNPVATESYGQVATNHQSAQAQAQTGWVQNQGILPGMVWQDRDVYLQGPIWAKIPHTDGNFHPSPLMGGFGMKHPPPQILIKNTPVPADPPTAFNKDKLNSFITQYSTGQVSVEIEWELQKENSKRWNPEIQYTSNYYKSNNVEFAVNTEGVYSEPRPIGTRYLTRNL

SEQ ID NO: 716 - protein, 736 aa, Artificial Sequence
  source: /note="Description of Artificial Sequence: Synthetic polypeptide"
  MOD_RES (442)..(442): Any naturally occurring amino acid
MAADGYLPDWLEDNLSEGIREWWALKPGAPQPKANQQHQDNARGLVLPGYKYLGPGNGLDKGEPVNAADAAALEHDKAYDQQLKAGDNPYLKYNHADAEFQERLKEDTSFGGNLGRAVFQAKKRLLEPLGLVEEAAKTAPGKKRPVEQSPQEPDSSAGIGKSGAQPAKKRLNFGQTGDTESVPDPQPIGEPPAAPSGVGSLTMASGGGAPVADNNEGADGVGSSSGNWHCDSQWLGDRVITTSTRTWALPTYNNHLYKQISTSTSGGSSNDNAYFGYSTPWGYFDFNRFHCHFSPRDWQRLINNNWGFRPKRLNFKLFNIQVKEVTDNNGVKTIANNLTSTVQVFTDSDYQLPYVLGSAHEGCLPPFPADVFMIPQYGYLTLNDGSQAVGRSSFYCLEYFPSQMLRTGNNFQFSYEFENVPFHSSYAHSQSLDRLMNPLIDXYLHYLSKTINGSGQNQQTLKFSVAGPSNMAVQGRNYIPGPSYRQQRVSTTVTQNNNSEFAWPGASSWALNGRNSLMNPGPAMASHKEGEDRFFPLSGSLIFGKQGTGRDNVDADKVMITNEEEIKTTNPVATESYGQVATNHQSAQAQAQTGWVQNQGILPDMVWQDRDVYLQGPIWAKIPHTDGNFHPSPLMGGFGMKHPPPQILIKNTPVPADPPTAFNKDKLNSFITQYSTGQVSVEIEWELQKENSKRWNPEIQYTSNYYKSNNVEFAVNTEGVYSEPRPIGTRYLTRNL

SEQ ID NO: 717 - protein, 736 aa, Artificial Sequence; identical to SEQ ID NO: 697
  source: /note="Description of Artificial Sequence: Synthetic polypeptide"

SEQ ID NO: 718 - protein, 736 aa, Artificial Sequence; identical to SEQ ID NO: 701
  source: /note="Description of Artificial Sequence: Synthetic polypeptide"

SEQ ID NO: 719 - protein, 736 aa, Artificial Sequence
  source: /note="Description of Artificial Sequence: Synthetic polypeptide"
MAADGYLPDWLEDNLSEGIREWWALKPGAPQPRANQQHQDNARGLVLPGYKYLGPGNGLDKGEPVNAADAAALEHDKAYDQQLKAGDNPYLKYNHADAEFQERLKEDTSFGGNLGRAVFQAKKRLLEPLGLVEEAAKTAPGKKRPVEQSPQEPDSSAGIGKSGAQPAKKRLNFGQTGDTESVPDPQPIGEPPAAPSGVGSLTMASGGGAPVADNNEGADGVGSSSGNWHCDSQWLGDRVITTSTRTWALPTYNNHLYKQISNSTSGGSSNDNAYFGYSTPWGYFDFNRFHCHFSPRDWQRLINNNWGFRPKRLNFKLFNIQVKEVTDNNGVKTIANNLTSTVQVFTDSDCQLPYVLGSAHEGCLPPFPADVFMIPQYGYLTLNDGSQAVGRSSFYCLEYFPSQMLRTGNNFQFSYEFENVPFHSSYAHSQSLDRLTNPLIDQYLYYLSKTINGSGQNQQTLKFSVAGPSNMAVQGRNYIPGPSYRQQRVSTTVTQNNNSEFAWPGASSWALNGRNSLMNPGPAMASHKEGEDRFFPLSGSLIFGKQGTGRDNVDADKVMITNEEEIKTTNPVATESHGQVATNHQSAQAQAQTGWVQNQGILPGMVWQDRDVYLQGPIWAKIPHTDGNFHPSPLMGGFGMKHPPPQILIKNTPVPADPPTAFNKDKLNSFITQYSTGQVSVEIEWELQKENSKRWNPEIQYTSNYYKSNNVEFAVNTEGVYSEPRPIGTRYLTRNL

SEQ ID NO: 720 - protein, 736 aa, Artificial Sequence
  source: /note="Description of Artificial Sequence: Synthetic polypeptide"
MAADGYLPDWLEDNLSEGIREWWALKPGAPQPKANQQHQDNARGLVLPGYKYLGPGNGLDKGEPVNAADAAALEHDKAYDQQLKAGDNPYLKYNHADAEFQERLKEDTSFGGNLGRAVFQAKKRLLEPLGLVEEAAKTAPGKKRPVEQSPQEPDSSAGIGKSGAQPAKKRLNFGQTGDTESVPDPQPIGEPPAAPSGVGSLTMASGGGAPVADNNEGADGVGSSSGNWHCDSQWLGDRVITTSTRTWALPTYNNHLYKQISNSTSGGSSNDNAYFGYSTPWGYFDFNRFHCHFSPRDWQRLINNNWGFRPKRLNFKLFNIQVKEVTDNNGVKTIANNLTSTVQVFTDSDYQLPYVLGSAHEGCLPPFPADVFMIPQYGYLTLNDGSQAVGRSSFYCLEYFPSQMLRTGNNFQFSYEFENVPFHSSYAHSQSLDRLMNPPIDQYLYYLSKTINGSGQNQQTLKFSVAGPSNMAVQGRNYIPGPSYRQQRVSTTVTQNNNSEFAWPGASSWALNGRNSLMNPGPAMASHKEGEDRFFPLSGSLIFGKQGTGRDNVDADKVMITNEEEIKTTNPVATESYGQVATNHQSAQAQAQTGWVQNQGILPGMVWQDRDVYLQGPIWAKIPHTDGNFHPSPLMGGFGMKHPPPQILIKNTPVPADPPTAFNKDKLNSFITQYSTGQVSVEIEWELQKENSKRWNPEIQYTSNYYKSNNVEFAVNTEGVYGEPRPIGTRYLTRNL

SEQ ID NO: 721 - protein, 736 aa, Artificial Sequence
  source: /note="Description of Artificial Sequence: Synthetic polypeptide"
MAADGYLPDWLEDNLSEGIREWWALKPGAPQPKANQQHQDNARGLVLPGYKYLGPGNGLDKGEPVNAADAAALEHDKAYDQQLKAGDNPYLKYNHADAEFQERLKEDTSFGGNLGRAVFQAKKRLLEPLGLVEEAAKTAPGKKRPVEQSPQEPDSSAGIGKSGAQPAKKRLNFGQTGDTESVPDPQPIGEPPAAPSGVGSLTMASGGGAPVADNNEGADGVGSSSGNWHCDSQWLGDRVITTSTRTWALPTYNNHLYKQISNSTSGGSSNDNAYFGYSTPWGYFDFNRFHCHFSPRDRQRLINNNWGFRPKRLNFKLFNIQVKEVTDNNGVKTIANNLTSTVQVFTDSDYQLPYVLGSAHEGCLPPFPADVFMIPQYGYLTLNDGSQAVGRSSFYCLEYFPSQMLRTGNNFQFSYEFENVPFHSSYAHSQSLDRLMNPLIDQYLYYLSKTINGSGQNQQTLKFSVAGPSNMAVQGRNYIPGPSYRQQRVSTTVTQNNNSEFAWPGASSWALNGRNSLMNPGPAMASHKEGEDRFFPLSGSLIFGKQGTGRDNVDADKVMITNEEEIKTTNPVATESYGQVATNHQSAQAQAQTGWVQNQGILPGMVWQDRDVYLQGPIWAKIPHTDGNFHPSPLMGGFGMKHPPPQILIKNTPVPADPPTAFNKDKLNSFITQYSTGQVSVEIEWELQKENSKRWNPEIQYTSNYYKSNNVEFAVNTEGVYSEPRPIGTRYLTRNL

SEQ ID NO: 722 - protein, 736 aa, Artificial Sequence
  source: /note="Description of Artificial Sequence: Synthetic polypeptide"
MAADGYLPDWLEDNLSEGIREWWALKPGAPQPKANQQHQDNARGLVLPGYKYLGPGNGLDKGEPVNAADAAALEHDKAYDQQLKAGDNPYLKYNHADAEFQERLKEDTSFGGNLGRAVFQAKKRLLEPLGLVEEAAKTAPGKKRPVEQSPQEPDSSAGIGKSGAQPAKKRLNFGQTGDTESVPDPQPIGEPPAAPSGVGSLTMASGGGAPVADNNEGADGVGSSSGNWHCNSQWLGDRVITTSTRTWALPTYNNHLYKQISNSTSGGSSNDNAYFGYSTPWGYFDFNRFHCHFSPRDWQRLINNNWGFRPKRLNFKLFNIQVKEVTDNNGVKTIANNLTSTVQVFTDSDYQLPYVLGSAHEGCLPPFPADVFMIPQYGYLTLNDGSQAVGRSSFYCLEYFPSQMLRTGNNFQFSYEFENVPFHSSYAHSQSLDRLMNPLIDQYLYYLSKTINGSGQNQQTLKFSVAGPGNMAVQGRNYIPGPSYRQQRVSTTVTQNNNSEFAWPGASSWALNGRNSLMNPGPAMASHKEGEDRFFPLSGSLIFGKQGTGRDNVDADKVMITNEEEIKTTNPVATESYGQVATNHQSAQAQAQTGWVQNQGILPGMVWQDRDVYLQGPIWAKIPHTDGNFHPSPLMGGFGMKHPPPQILIKNTPVPADPPTAFNKDKLNSFITQYSTGQVSVEIEWELQKENSKRWNPEIQYTSNYYKSNNVEFAVNTEGVYSEPRPIGTRYLTRNL

SEQ ID NO: 723 - protein, 736 aa, Artificial Sequence
  source: /note="Description of Artificial Sequence: Synthetic polypeptide"
MAADGYLPDWLEDNLSEGIREWWALKPGAPQPKANQQHQDNARGLVLPGYRYLGPGNGLDKGEPVNAADAAALEHDKAYDQQLKAGDNPYLKYNHADAEFQERLKEDTSFGGNLGRAVFQAKKRLLEPLGLVEEAAKTAPGKKRPVEQSPQEPDSSAGIGKSGAQPAKKRLNFGQTGDTESVPDPQPIGEPPAAPSGVGSLTMASGGGAPVADNNEGADGVGSSSGNWHCDSQWLGDRVITTSTRTWALPTYNNHLYKQISNSTSGGSSNDNAYFGYSTPWGYFDFNRFHCHFSPRDWQRLINNNWGFRPKRLNFKLFNIQVKEVTDNNGVKTVANNLTSTVQVFTDSDYQLPYVLGSAHEGCLPPFPADVFMIPQYGYLTLNDGSQAVGRSSFYCLEYFPSQMLRTGNNFQFSYEFENVPFHSSYAHSQSLDRLMNPLIDQYLYYLSKTINGSGQNQQTLKFSVAGPSNMAVQGRNYIPGPSYRQQRVSTTVTQNNNSEFAWPGASSWALNGRNSLMNPGPAMASHKEGEDRFFPLSGSLIFGKQGTGRDNVDADKVMITNEEEIKTTNPVATESYGQVATNHQSAQAQAQTGWVQNQGILPGMVWQDRDVYLQGPIWAKIPHTDGNFHPSPLMGGFGMKHPPPQILIKNTPVPADPPTAFNKDKLNSFITQYSTGQVSVEIEWELQKENSKRWNPEIQYTSNYYKSNNVEFAVNTEGVYSGPRPIGTRYLTRNL

SEQ ID NO: 724 - protein, 736 aa, Artificial Sequence; identical to SEQ ID NO: 134
  source: /note="Description of Artificial Sequence: Synthetic polypeptide"

SEQ ID NO: 725 - protein, 736 aa, Artificial Sequence
  source: /note="Description of Artificial Sequence: Synthetic polypeptide"
MAADGYLPDWLEDNLSEGIREWWALKPGAPQPKANQQRQDNARGLVLPGYKYLGPGNGLDKGEPVNAADAAALEHDKAYDQQLKAGGNPCLKYNHADAEFQERLKEDTSFGGNLGRAVFQAKKRLLEPLGLVEEAAKTAPGKKRPVEQSPQEPDSSAGIGRSGAQPAKKRLNFGQTGDTESVPDPQPIGEPPAAPSGVGSLTMASGGGAPVADNNEGADGVGSSSGNWHCDSQWLGDRVITTSTRTWALPTYNNHLYKQISNSTSGGSSNDNAYFGYSTPWGYFDFNRFHCHFSPRDWQRLINNNWGFRPKRLNFKLFNIQVKEVTDNNGVKAIANNLTSTVQVFTDSDYQLPYVLGSAHEGCLPPFPADVFMIPQYGYLTLNDGSQAVGRSSFYCLEYFPSQMLRTGNNFQFSYEFENVPFHSSYAHSQSLDRLMNPLIDQYLYYLSKTIDGSGQNQQTLKFSVAGPSNMAVQGRNYIPGPSYRQQRVSTTVTQNNNSEFAWPGASSWALNGRNSLMDPGPAMASHKEGEDRFFPLSGSLIFGKQGTGRDNVDADKVMITNEEEIKTTNPVATESYGQVATNHQSAQAQAQTGWVQNQGILPGMVWQDRDVYLQGPIWAKIPHTGGNFHPSPLMGGFGMKHPPPQILIKNTPVPADPPTAFNKDKLNSFITQYSTGQVSVEIEWELQKENSKRWNPEIQYTSNYYKSNNVEFAVNTEGVYSEPRPIGTRYLTRNL

SEQ ID NO: 726 - protein, 736 aa, Artificial Sequence
  source: /note="Description of Artificial Sequence: Synthetic polypeptide"
MAADGYLPDWLEDNLSEGIREWWALKPGAPQPKANQQHQDNARGLVLPGYKYLGPGNGLDKGEPVNAADAAALEHDKAYDQQLKAGDNPYLKYNHADAEFQERLKEDTSFGGNLGRAVFQAKKRLLEPLGLVEEAAKTAPGKKRPVEQSPQEPDSSAGIGKSGAQPAKKRLNFGQTGDTESVPDPQPIGEPPAAPSGVGSLTMASGGGAPVADNNEGADGVGSSSGNWHCDSQWLGDRVITTSTRTWALPTYNNHLYKQISNSTSGGSSNDNAYFGYSTPWGYFDFNRFHCHFSPRDWQRLINNNWGFRPKRLNFKLFNIQVKEVTDNNGVKTIANNLTSTVQVFTDSDYQLPYVLGSAHEGCLPPFPADVFMIPQYGYLTLNDGSQAVGRSSFYCLEYFPSQMLRTGNNFQFSYEFENVPFHSSYAHSQSLDRLMNPLIDQYLYYLSKTINGSGQNQQTLKFSVAGPSNMAVQGRNYIPGPSYRQQRVSTTVTQNNNSEFAWPGASSWALNGRNSLMNPGPAMASHKEGEDRFFPLSGSLIFGKQGTGRDNVDADKVMITNEEEIKTTNPVATESYGQVATNHQSAQAQAQTGWVQNQGILPGMVWQDRDVYLQGPIWAKIPHTDGNFHPSPLMGGFGMKHPPPQILIKNTPVPADPPTAFNKDKLNSFITQYSTGQVSVEIEWELQKENSKRWNPEIQYTSNYYKPNNVEFAVNTEGVYSEPRPIGTRYLTRNL

SEQ ID NO: 727 - protein, 736 aa, Artificial Sequence
  source: /note="Description of Artificial Sequence: Synthetic polypeptide"
MAADGYLPDWLEDNLSEGIREWWALKPGAPQPKANQQHQDNARGLVLPGYKYLGPGNGLDKGEPVNAADAAALEHNKAYDQQLKAGDNPYLKCNHADAEFQERLKEDTSFGGNLGRAVFQAKKRPLEPLGLVEEAAKTAPGKKRPVEQSPQEPDSSAGIGKSGAQPAKKRLNFGQTGDTESVPDPQPIGEPPAAPSGVRSLTMASGGGAPVADNNEGADGVGSSSGNWHCDSQWLGDRVITTSTRTWALPTYNNHLYKQISNSTSGGSSNDNAYLGYSTPWGYFDFNRFHCHFSPRDWQRLINNNWGFRPKRLNFKLFNIQVKEVTDNNGVKTIANNLTSTVQVFTDSDYQLPYVLGSAHEGCLPPFPADVFMIPQYGYLTLNDGSQAVGRSSFYCLEYFPSQMLRTGNNFQFSYEFENVPFHSSYAHSQSLDRLMNPLIDQYLYYLSKTINGSGQNQQTLKFSVAGPSNMAVQGRNYIPGPSYRQQRVSTTVTQNNNSEFAWPGASSWALNGRNSLMNPGPTMASHKEGEDRFFPLSGSLIFGKQGTGRDNVDADKVMITNEEEIKTTNPVATESYGQVATNHQSAQAQAQTGWVQNQGILPGMVWQDRDVYLQGPIWAKIPHTDGNFHPSPLMGGFGMKHPPPQILIKNTPVPADPPTAFNKDKLNSFITQYSTGQVSVEIEWELQKENSKRWNPEIQYTSNYYKSNNVEFAVNTEGVYSEPRPIGTRYLTRNL

SEQ ID NO: 728 - protein, 736 aa, Artificial Sequence
  source: /note="Description of Artificial Sequence: Synthetic polypeptide"
MAADGYLPDWLEDNLSEGIREWWALKPGAPQPKANQQHQDNARGLVLPGYKYLGPGNGLDKGEPVNAADAAALVHDKAYDQQLKAGDNPYLKCNHADAEFQERLKEDTSFGGNLGRAVFQAKKRLLEPLGLVEEAAKTAPGKKRPVEQSPQEPDSSAGIGKSGAQPAKKRLNFGQTGDTESVPDPQPIGEPPAAPSGVGSLTMASGGGAPVADNNEGADGVGSSSGNWHCDSQWLGDRVITTSTRTWALPTYNNHLYKQISNSTSGGSSNDNAYLGYSTPWGYFDFNRFHCHFSPRDWQRLINNNWGFRPKRLNFKLFNIQVKEVTDNNGVKTIANNLTSTVQVFTDSDYQLPYVLGSAHEGCLPPFPADVFTIPQYGYLTLNDGSQAVGRSSFYCLEYFPSQMLRTGNNFQFSYEFENVPFHSSYAHSQSLDRLMNPLIDQYLYYLSKTINGSGQNQQTLKFSVAGPSNMAVQGRNYIPGPSYRQQRVSTTVTQNNNSEFAWPGASSWALNGRNSLMNPGPAMASHKEGEDRFFPLSGSLIFGKQGTGRDNVDADKVMITNEEEIKTTNPVATESYGQVATNHQSAQAQAQTGWVQNQGILPGMVWQDRDVYLQGPIWAKIPHTDGNFHPSPLMGGFGMKHPPPQILIKNTPVPADPPTAFNKDKLNSFITQYSTGQVSVEIEWELQKENSKRWNPEIQYTSNYYKSNNVEFAVNTEGVYSEPRPIGPRYLTRNF

SEQ ID NO: 729 - protein, 736 aa, Artificial Sequence
  source: /note="Description of Artificial Sequence: Synthetic polypeptide"
MAADGYLPDWLEDNLSEGIREWWALKPGAPQPKANQQHQDNARGLVLPGYKYLGPGNGLDKGEPVNAADAAALEHNKAYDQQLKAGDNPYLKCNHADAEFQERLKEDTSFGGNLGRAVFQAKKRLLEPLGLVEEAAKTAPGKKRPVEQSPQEPDSSAGIGKSGAQPAKKRLNFGQTGDTESVPDPQPIGEPPAAPSGVRSLTMASGGGAPVADNNEGADGVGSSSGNWHCDSQWLGDRVITTSTRTWALPTYNNHLYKQISNSTSGGSSNDNAYLGYSTPWGYFDFNRFHCHFSPRDWQRLINNNWGFRPKRLNFKLFNIQVKEVTDNNGVKTIANNLTSTVQVFTDSDYQLPYVLGSAHEGCLPPFPADVFMIPQYGYLTLNDGSQAVGRSSFYCLEYFPSQMLRTGNNFQFSYEFENVPFHSSYAHSQSLDRLMNPLIDQYLYYLSKTINGSGQNQQTLKFSVAGPSNMAVQGRNYIPGPSYRQQRVSTTVTQNNNSEFAWPGASSWALNGRNSLMNPGPAMASHKEGEDRFFPLSGSLIFGKQGTGRDNVDADKVMITNEEEIKTTNPVATESYGQVATNHQSAQAQAQTGWVQNQGILPGMVWQDRDVYLQGPIWAKIPHTDGNFHPSPLMGGFGMKHPPPQILIKNTPVPADPPTAFNKDKLNSFITQYSTGQVSVEIEWELQKENSKRWNPEIQYTSNYYKSNNVEFAVNTEGVYSEPRPIGTRYLTRNL

SEQ ID NO: 730 - protein, 736 aa, Artificial Sequence
  source: /note="Description of Artificial Sequence: Synthetic polypeptide"
MAADGYLPDWLEDNLSEGIREWWALKPGAPQPKANQQHQDNARGLVLPGYKYLGPGNGLDKGEPVNAADAAALEHDKAYDQQLKAGDNPYLKCNHADAEFQERLKEDTSFGGNLGRAVFQAKKRLLEPLGLVEEAAKTAPGKKRPVEQSPQEPDSSAGIGKSGAQPAKKRLNFGQTGDTESVPDPQPIGEPPAAPSGVGSLTMASGGGAPVADNNEGADGVGSSSGNWHCDSQWLGDRVITTSTRTWALPTYNNHLYKQISNSTSGGSSNDNAYLGYSTPWGYFDFNRFHCHFSPRDWQRLINNNWGFRPKRLNFELFNIQVKEVTDNNGVKTIANNLTSTVQVFTDSDYQLPYVLGSAHEGCLPPFPADVFMIPQYGYLTLNDGSQAVGRSSFYCLEYFPSQMLRTGNNFQSSYEFENVPFHSSYAHSQSLDRLMNPLIDQYLYYLSKTINGSGQNQQTLKFSVAGPSNMAVQGRNYIPGPSYRQQRASTTVTQNNNSEFAWPGASSWALNGRNSLMNPGPAMASHKEGEDRFFPLSGSLIFGKQGTGRDNVDADKVMITNEEEIKTTNPVATESYGQVATNHQSAQAQAQTGWVQNQGILPGMVWQDRDVYLQGPIWAKIPHTDGNFHPSPLMGGFGMKHPPPQILIKNTPVPADPPTAFNKDKLNSFITQYSTGQVSVEIEWELQKENSKRWNPEIQYTSNYYKSNNVEFAVNTEGVYSEPRPIGTRYLTRNL

SEQ ID NO: 731 - protein, 736 aa, Artificial Sequence
  source: /note="Description of Artificial Sequence: Synthetic polypeptide"
MAADGYLPDWLEDNLSEGIREWWALKPGAPQPKANQQHQDNARGLVLPGYKYLGPGNGLDKGEPVNAADAAALEHDKAYDQQLKAGDNPYLKCNHADAEFQERLKEDTSFGGNLGRAVFQAKKRLLEPLGLVEEAAKTAPGKKRPVEQSPQEPDSSAGIGKSGAQPAKKRLNFGQTGDTESVPDPQPIGEPPAAPPGVGSLTMASGGGAPVADNNEGADGVGSSSGNWHCDSQWLGDRVITTSTRTWALPTYNNHLYKQISNSTSGGSSNDNAYLGYSTPWGYFDFNRFHCHFSPRDWQRLINNNWGFRPKRLNFKLFNIQVKEVTDNNGVKTIANNLTSTVQVFTDSDYQLPYVLGSAHEGCLPPFPADVFMIPQYGYLTLNDGSQAVGRSSFYCLEYFPSQMLRTGNNFQFSYEFENVPFHSSYAHSQSLDRLMNPLIDQYLYYLSKTISGSGQNQQTLKFSVAGPSNMAVQGRNYIPGPSYRQQRVSTTVTQNNSSEFAWPGASSWALNGRNSLMNPGPAMASHKEGEDRFFPLSGSLIFGKQGTGRDNVDADKVMITNEEEIKTTNPVATESYGQVATNHQSAQAQAQTGWVQNQGILSGMVWQDRDVYLQGPIWAKIPHTDGNFHPSPLMGGFGMKHPPPQILIKNTPVPADPPTAFNKDKLNSFITQYSTGQVSVEIEWELQKENSKRWNPEIQYTSNYYKSNNVEFAVNTEGVYSEPRPIGTRYLTRNL

SEQ ID NO: 732 - protein, 736 aa, Artificial Sequence
  source: /note="Description of Artificial Sequence: Synthetic polypeptide"
MAADGYLPDWLEDNLSEGIREWWALKPGAPQPKANQQHQDNARGLVLPGYKYLGPGNGLDKGEPVNAADAAALEHDKAYDQQLKAGDNPYLKCNHADAEFQERLKEDTSFGGNLGRAVFQAKKRLLEPLGLVEEAAKTAPGKKRPVEQSPQEPDSSAGIGKSGAQPAKKRLNFGQTGDTESVPDPQPIGEPPAAPSGVGSLTMASGGGAPVADNNEGADGVGSSSGNWHCDSQWLGDRVITTSTRTWALPTYNNHLYKQISNSTSGGSSNDNAYLGYSTPWGYFDFNRFHCHFSPRDWQRLINNNWGFRPKRLNFKLFNIQVKEVTDNNGVKTIANNLTSTVQVFTDSDYQLPYVLGSAHEGCLPPFPADVFMIPQYGYLTLNDGSQAVGRSSFYCLEYFPSQMLRTGNNFQFSYEFENVPFHSSYAHSQSLDRLMNPLIDQYLYYLSKTINGSGQNQQTLKFSVAGPSNMAVQGRNYIPGPSYRQQRVSTTVTQNNNSEFAWPGASSWALNGRNSLMNPGPAMASHKEGEDRFFPLSGSLIFGKQGTGRDNVDADKVMITNEEEIKTTNPVATESYGQVATNHQSAQAQAQTGWVQNQGILPGMVWQDRDVYLQGPIWAKIPHTDGNFHPSPLMGGFGMKHPPPQILIKNTPVPADPPTAFNKDKLNSFITQYSTGQVSVEIEWELQKENSKRWNPEIQYTSNYYKSNNVEFAVNTEGVYSEPRPIGTRYLTRNL

SEQ ID NO: 733 - protein, 736 aa, Artificial Sequence; identical to SEQ ID NO: 732
  source: /note="Description of Artificial Sequence: Synthetic polypeptide"

SEQ ID NO: 734 - protein, 736 aa, Artificial Sequence
  source: /note="Description of Artificial Sequence: Synthetic polypeptide"
MAADGYLPDWLEDNLSEGIREWWALKPGAPQPKANQQHQDNARGLVLPGYKYLGPGNGLDKGEPVNAADAAALEHDKAYDQQLKAGDNPYLKCNHADAEFQERLKEDTSFGGNLGRAVFQAKKRLLEPLGLVEEAAKTAPGKKRPVEQSPQEPDSSAGIGKSGAQPAKKRLNFGQTGDTESVPDPQPIGEPPAAPSGVGSLTMASGGGAPVADNNEGADGVGSSSGNWHCDSQWLGDRVITTSTRTWALPTYNNHLYKQISNSTSGGSSNDNAYLDYSTPWGYFDFNRFHCHFSPRDWQRLINNNWGFRPKRLNFKLFNIQVKEVTDNNGVKTIANNLTSTVQVFTDSDYQLPYVLGSAHEGCLPPFPADVFMIPQYGYLTLNDGSQAVGRSSFYCLEYFPSQMLRTGNNFQFSYEFENVPFHSSYAHSQSLDRLMNPLIDQYLYYLSKTINGSGQNQQTLKFSVAGPSNMAVQGRNYIPGPSYRQQRVSTTVTQNNNSEFAWPGASSWALNGRNSLMNPGPAMASHKEGEDRFFPLSGSLIFGKQGTGRDNVDADKVMITNEEEIKTTNPVATESYGQVATNHQSAQAQAQTGWVQNQGILPGMVWQGRDVYLQGPIWAKIPHTDGNFHPSPLMGGFGMKHPPPQILIKNTPVPADPPTAFNKDKLNSFITQYSTGQVSVEIEWELQKENSKRWNPEIQYTSNYYKSNNVEFAVNTEGVYSEPRPIGTRYLTRNL

SEQ ID NO: 735 - protein, 736 aa, Artificial Sequence; identical to SEQ ID NO: 732
  source: /note="Description of Artificial Sequence: Synthetic polypeptide"

SEQ ID NO: 736 - protein, 736 aa, Artificial Sequence
  source: /note="Description of Artificial Sequence: Synthetic polypeptide"
MAADGYPPDWLEDNLSEGIREWWALKPGAPQPKANQQHQDNARGLVLPGYKYLGPGNGLDKGEPVNAADAAALEHDKAYDQQLKAGDNPHLKYNHADAEFQERLKEDTSFGGNLGRAVFQAKKRLLEPLGLVEEAAKTAPGKKRPVEQSPQEPDSSAGIGKSGAQPAKKRLNFGQTGDTESVPDPQPIGEPPAAPSGVGSLTMASGGGAPVADNNEGADGVGSSSGNWHCDSQWLGDRVITTSTRTWALPTYNNHLYKQISNSTSGGSSNDNAYFGYSTPWGYFDFNRFHCHFSPRDWQRLINNNWGFRPKRLNFKLFNIQVKEVTDNNGVKTIANNLTSTVQVFTDSDYQLPYVLGSAHEGCLPPFPADVFMIPQYGYLTLNDGSQAVGRSSFYCLEYFPSQMLRTGNNFQFSYEFENVPFHSSYAHSQSLDRLMNPLIDQYLYYLSKTINGSGQNQQTLKFSVAGPSNMAVQGRNYIPGPSYRQQRVSTTVTQNNNSEFAWPGASSWALNGRNSLMNPGPAMASHKEGEDRFFPLSGSLIFGKQGTGRDNVDADKVMITNEEEIKTTNPVATESYGQVATNHQSAQAQAQTGWVQNQGILPGMVWQDRDVYLQGPIWAKIPHTDGNFHPSPLMGGFGVKHPPPQILIKNTPVPADPPTAFNKDRLNSFITQYSTGQVSVEIEWELQKENSKRWNPEIQYTSNYYKSNNVEFAVNTEGVYSEPRPIGTRYLTRNL

SEQ ID NO: 737 - protein, 736 aa, Artificial Sequence
  source: /note="Description of Artificial Sequence: Synthetic polypeptide"
MAADGYLPDWLEDNLSEGIREWWALKPGAPQPKANQQHQDNARGLVLPGYKYLGPGNGLDKGEPVNAADAAALEHDKAYDQQLKAGDNPYLKYNHADAEFQERLKEDTSFGGNLGRAVFQAKKRLLEPLGLVEEAAKTAPGKKRPVEQSPQEPDSSAGIGKSGAQPAKKRLNFGQTGDTESVPDPQPIGEPPAAPSGVGSLTMASGGGAPVADNNEGADGVGSSSGNWHCDSQWLGDRVITTSTRTWALPTYNNHLYKQISNSTSGGSSNDNAYFGYSTPWGYFDFNRFHCHFSPRDWQRLINNNWGFRPKRLNFKLFNIQVKEVTDNNGVKTIANNLTSTVQVFTDSDYQLPYVLGSAHEGCLPPFPADVFMIPQYGYLTLNDGSQAVGRSSFYCLEYFPSQMLRTGNNFQFSYEFENVPFHSSYAHSQSLDRLMNPLIDQYLYYLSKTINGSGQNQQTLKFSVAGPSNMAVQGRNYIPGPSYRQQRVSTTVTQNNNSEFAWPGASSWALNGRNSLMNPGPAMASHKEGEDRFFPLSGSLIFGKQGTGRDNVDADKVMITNEEEIKTTNPVATESYGQVATNHQSAQAQAQTGWVQNQGILPGMVWQDRDVYLQGPIWAKIPHTDGNFHPSPLMGGFGVKHPPPQILIKNTPVPADPPTAFNKDKLNSFITQYSTGQVSVEIEWELQKENSKRWNPEIQYTSNYYKSNNVEFAVNTEGVYSEPRPIGTRYLTRNL

SEQ ID NO: 738 - protein, 736 aa, Artificial Sequence
  source: /note="Description of Artificial Sequence: Synthetic polypeptide"
MAADGYLPDWLEDNLSEGIREWWALKPGAPQPKANQQHQDNARGLVLPGYKYLGPGNGLDKGEPVNAADAAALEHDKAYDQQLKAGDNPYLKYNHADAEFQERLKEDTSFGGNLGRAVFQAKKRLLEPLGLVEEAAKTAPGKKRPVEQSPQEPDSSAGIGKSGAQPAKKRLNFGQTGDTESVPDPQPIGEPPAAPSGVGSLTMASGGGAPVADNNEGADGVGSSSGNWHCDSQWLGDRVITTSTRTWALPTYNNHLYKQISNSTSGGSSNDNAYFGYSTPWGYFDFNRFHCHFSPRDWQRLTNNNWGFRPKRLNFKLFNIQVKEVTDNNGVKTIANNLTSTVQVFTDSDYQLPYVLGSAHEGCLPPFPADVFMIPQYGYLTLNDGSQAVGRSSFYCLEYIPSQMLRTGNNFQFSYEFENVPFHSSYAHSQSLDRLMNPLIDQYLYYLSKTINGSGQNQQTLKFSVAGPSNMAVQGRNYIPGPSYRQQRVSTTVTQNNNSEFAWPGASSWALNGRNSLMNPGPAMASHKEGEDRFFPLSGSLIFGKQGTGRDNVDADKVMITNEEEIKTTNPVATESYGQVATNHQSAQAQAQTGWVQNQGILPGMVWQDRDVYLQGPIWAKIPHTDGNFHPSPLMGGFGVKHPPPQILIKNTPVPADPPTAFNKDKLNSFITQYSTGQVSVEIEWELQKENSKRWNPEIQYTSNYYKSNNVEFAVNTEGVYSEPRPIGTRYLTRNL

SEQ ID NO: 739 - protein, 736 aa, Artificial Sequence
  source: /note="Description of Artificial Sequence: Synthetic polypeptide"
MAADGYLPDWLEDNLSEGIREWWALKPGAPQPKANQQHQDNARGLVLPGYKYLGPGNGLDKGEPVNAADAAALEHDKAYDQQLKAGDNPYLKYNHADAEFQERLKEDTSFGGNLGRAVFQAKKRLLEPLGLVEEAAKTAPGKKRPVEQSPQEPDSSAGIGKSGAQPAKKRLNFGQTGDTESVPDPQPIGEPPAAPSGVGSLTMASGGGAPVADNNEGADGVGSSSGNWHCDSQWLGDRVITTSTRTWALPTYNNHLYKQISNSTSGGSSNDNAYFGYSTPWGYFDFNRFHCHFSPRDWQRLINNNWGFRPKRLNFKLFNIQVKEVTDNNGVKTIANNLTSTVQVFTDSDYQLPYVLGSAHEGCLPPFPADVFMIPQYGYLTLNDGSQAVGRSSFYCLEYFPSQMLRTGNNFQFSYEFENVPFHSSYAHSQSLDRLMNPLIDQYLYYLSKTINGSGQNQQTLKFSVAGPSNMAVQGRNYIPGPSYRQQRVSTTVTQNNNSEFAWPGASSWALNGRNSLMNPGPAMASHKEGEDRFFPLSGSLISGKQGTGRDNVDANKVMITNEEEIKTTNPVATESYGQVATNHQSAQAQAQTGWVQNQGILPGMVWQDRDVYLQGPIWAKIPHTDGNFHPSPLMGGFEMKHPPPQILIKNTPVPADPPTAFNKDKLNSFITQYSTGQVSVEIEWELQKENSKRWNPEIQYTSNYYKSNNVEFAVNTEGVYSEPRPIGTRYLTRNL

SEQ ID NO: 740 - protein, 736 aa, Artificial Sequence
  source: /note="Description of Artificial Sequence: Synthetic polypeptide"
MAADGYLPDWLEDNLSEGIREWWALKPGAPQPKANQQHQDNARGLVLPGYKYLGPGNGLDKGEPVNAADAAALEHDKAYDQQLKAGDNPYLKYNHADAEFQERLKEDTSFGGNLGRAVFQAKKRLLEPLGLVEEAAKTAPGKKRPVEQSPQEPDSSAGIGKSGAQPAKKRLNFGQTGDTESVPDPQPIGEPPAAPSGVGSLTIASGGGAPVADNNEGADGVGSSSGNWHCDSQWLGDRVITTSTRTWALPTYNNHLYKRISNSTSGGSSNDNAYFGYSTPWGYFDFNRFHCHFSPRDWQRLINNNWGFRPKRLNFKLFNIRVKEVTDNNGVKTITNNLTSTVQVFTDSDYQLPYVLGSAHEGCLPPFPADVFMIPQYGYLTLNDGSQAVGRSSFYCLEYFPSQMLRTGNNFQFSYEFENVPFHSSYAHSQSLDRLMNPLIDQYLYYLSKTINGSGQNQQTLKFSVAGPSNMAVQGRNYIPGPSYRQQRVSTTVTRNNNSEFAWPGASSWALNGRNSLMNPGPAMASHKEGEDRFFPLSGSLIFGKQGTGRDNVDADKVMITNEEEIKTTNPVATESYGQVATNHQSAQAQAQTGWVQNQGILPGMVWQDRDVYLQGPIWAKIPHTDGNFHPSPLMGGFGVKHPPPQILIKNTPVPADPPTAFNKDKLNSFITQYSTGQVSVEIEWELQKENSKRWNPEIQYTSNYYKSNNVEFAVNTEGVYSEPRPIGTRYLTRNL

SEQ ID NO: 741 - protein, 736 aa, Artificial Sequence
  source: /note="Description of Artificial Sequence: Synthetic polypeptide"
MAADGYLPDWLEDNLSEGIREWWALKPGAPQPKANQQHQDNARGLVLPGYKYLGPGNGLDKGEPVNAADAAALEHDKAYDQQLKAGDNPYLKYNHADAEFQERLKEDTSFGGNLGRAVFQAKKRLLEPLGLVEEAAKTAPGKKRPVEQSPQEPDSSAGIGKSGAQPAKKRLNFGQTGDTEPVPDPQPIGEPPAAPSGVGSLTMASGGGAPVADNNEGADGVGSSSGNWHCDSQWLGDRVITTSTRTWALPTYNNHLYKQISNSTSGGSSNDNAYFGYSTPWGYFDFNRFHCHFSPRDWQRLINNNWGFRPKRLNFKLFNIQVKEVTDNNGVKTIANNLTSTVQVFTDSDYQLPYVLGSAHEGCLPPFPAGVFMIPQYGYLTLNDGSQAVGRSSFYCLEYFPSQMLRTGNNFQFSYEFENVPFHSSYAHSQSLDRLMNPLIDQYLYYLSKTINGSGQNQQTLKFSVAGPSNMAVQGRNYIPGPSYRQQRVSTTATQNNNSEFAWPGASSWALNGRNSLMNPGPAMASHKEGEDRFFPLSGSLIFGKQGTGRDNVDADKVMITNEEEIKTTNPVATESYGQVATNHQSAQAQAQTGWVQNQGILPGMVWQDRDVYLQGPIWAKIPHTDGNFHPSPLMGGFGMKHPPPQILIKNTPVPADPPTAFNKDKLNSFITQYSTGQVSVEIEWELQKENSKRWNPEIQYTSNYYKSNNVEFAVNTEGVYSEPRPIGTRYLTRNL

SEQ ID NO: 742 - protein, 736 aa, Artificial Sequence
  source: /note="Description of Artificial Sequence: Synthetic polypeptide"
MAADGYLPDWLEDNLSEGIREWWALKPGAPQPKANQQHQDNARGLVLPGYKYLGPGNGLDKGEPVNAADAAALEHDKAYDQQLKAGDNPYLKYNHADAGFQERLKEDTSFGGNLGRAVFQAKKRLLEPLGLVEEAAKTAPGKKRPVEQSPQEPDSSAGIGKSGAQPAKKRLNFGQTGDTESVPVPQPIGEPPAAPSGVGSLTMASGGGAPVADNNEGADGVGSSSGNWHCDSQWLGDRVITTSTRTWALPTYNNHLYKQISNSTSGGSSNDNAYFGYSTPWGYFDFNRFHCHFSPRDWQRLINNNWGFRPKRLNFKLFNIQVKEVTDNNGVKTIANNLTSTVQVFTDSDYQLPYVLGSAHEGCLPPFPADVFMIPQYGYLTLNDGSQAVGRSSFYCLEYFPSQMLRTGNNFQFSYEFENVPFHSSYAHSQSLDRLMNPLIDQYLYYLSKTINGSGQNQQTLKFSVAGPSNMAVQGRNYIPGPSYRQQRVSTTVTQNNNSEFAWPGASSWALNGRNSLMNPGPAMASHKEGEDRFFPLSGSLIFGKQGAGRDNVDADKVMITNEEEIKTTNPVATESYGQVATNHQSAQAQAQTGWVQNQGILPGMVWQDRDVYLQGPIWAKIPHTDGNFHPSPLMGGFGMKHPPPQILIKNTPVPADPPTAFNKDKLNSFITQYSTGQVSVEIEWELQKENSKRWNPEIQYTSNYYKSNNVEFAVNTEGVYSEPRPIGTRYLTRNL

SEQ ID NO: 743 - protein, 736 aa, Artificial Sequence
  source: /note="Description of Artificial Sequence: Synthetic polypeptide"
  MOD_RES (126)..(126): Any naturally occurring amino acid
MAADGYLPDWLEDNLSEGIRERWALKPGAPQPKANQQHQDNARGLVLPGYKYLGPGNGLDKGEPVNAADAAALEHDKAYDQQLKAGDNPYLKYNHADAEFQERLKEDTSFGGNLGRAVFQAKKRLXEPLGLVEEAAKTAPGKKRPVEQSPQEPDSSAGIGKSGAQPAKKRLNFGQTGDTESVPDPQPIGEPPAAPSGVGSLTMASGGGAPVADNNEGADGVGSSSGNWHCDSQWLGDRVITTSTRTWALPTYNNHLYKQISNSTSGGSSNDNAYFGYSTPWGYFDFNRFHCHFSPRDWQRLINNNWGFRPKRLNFKLFNIQVKEVTDNNGVKTIANNLTSTVQVFTDSDYQLPYVLGSAHEGCLPPFPADVFMIPQYGYLTLNDGSQAVGRSSFYCLEYFPSQMLRTGNNFQFSYEFENVPFHSSYAHSQSPDRLMNPLIDQYLYYLSKTINGSGQNQQTLKFSVAGPSNMAVQGRNYIPGPSYRQQRVSTTVTQNNNSEFAWPGASSWALNGRNSLMNPGPAMASHKEGEDRFFPLSGSLIFGKQGTGRDNVDADKVMITNEEEIKTTNPVATESYGQVATNHQSAQAQAQTGWVQNQGILPGMVWQDRDVYLQGPIWAKIPHTDGNFHPSPLMGGFGVKHPPPQILIKNTPVPADPPTAFNKDKLNSFITQYSTGQVSVEIEWELQKENSKRWNPEIQYTSNYYKSNNVEFAVNTEGVYSEPRPIGTRYLTRNL

SEQ ID NO: 744 - protein, 736 aa, Artificial Sequence
  source: /note="Description of Artificial Sequence: Synthetic polypeptide"
MAADGYLPDWLEDNLSEGIREWWALKPGAPQPKANQQHQDNARGLVLPGYKYLGPGNGLDKGEPVNAADAAALEHDKAYDQQLKAGDNPYLKYNHADAEFQERLKEDTSFGGNLGRAVFQAKKRLLEPLGLVEEAAKTAPGKKRPVEQSPQEPDSSAGIGKSGAQPAKKRLNFGQTGDTESVPDPQPIGEPPAAPSGVGSLTMASGGGAPVADNNEGADGVGSSSGNWHCDSQWLGDRVITTSTRTWALPTYNNHLYKQISNSTSGGSSNDNAYLGYSTPWGYFDFNRFHCHFSPRDWQRLINNNWGFRPKRLNFKLFNIQVKEVTDNNGVKTIANNLTSTVQVFTDSDYQLPYVLGSAHEGCLPPFPADVFMIPQYGYLTLNDGSQAVGRSSFYCLEYFPSQMLRTGNNFQFSYEFENVPFHSSYAHSQSLDRLMNPLIDQYLYYLSKTINGSGQNQQTLKFSVAGPSNMAVQGRNYIPGPSYRQQRVSTTVTQNNNSEFAWPGASSWALNGRNSLMNPGPAMASHKEGEDRFFPLSGSLIFGKQGTGRDNVDADKVMITNEEEIKTTNPVATESYGQVATNHQSAQAQAQTGWVQNQGILPGMVWQDRDVYLQGPIWAKIPHTDGNFHPSPLMGGFGMKHPPPQILIKNTPVPADPPTAFNKDKLNSFITQYSTGQVSVEIEWELQKENSKRWNPEIQYTSNYYKSNNVEFAVNTEGVYSEPRPIGTRYLTRNL

SEQ ID NO: 745 - protein, 736 aa, Artificial Sequence
  source: /note="Description of Artificial Sequence: Synthetic polypeptide"
MAADGYLPDWLEDNLSEGIREWWALKPGAPQPKANQQHQDNARGLVLPGYKYLGPGNGLDKGEPVNAADAAALEHDKAYDQQLKAGDNPYLKYNHADAEFQERLKEDTSFGGNLGRAVFQAKKRLLEPLGLVEEAAKTAPGKKRPVEQSPQEPDSSAGIGKSGAQPAKKRLNFGQTGDTESVPDPQPIGEPPAAPSGVGSLTMASGGGAPVADNNEGADGVGSSSGNWHCDSQWLGDRVITTSTRTWALPTYNNHLYKQISNSTSGGSSNDNAYFGYSTPWGYFDFNRFHCHFSPRDWQRLINNNWGFRPKRLNFKLFNIQVKEVTDNNGVKTIANNLTSTVQVFTDSDYQLPYVLGSAHEGCLPPFPADVFMIPQYGYLTLNDGSQAVGRSSFYCLEYFPSQMLRTGNNFQFSYEFENVPFHSSYAHSQSLDRLMNPLIDQYLYYLSKTINGSGQNQQTLKFSVAGPSNMAVQGRNYIPGPSYRQQRVSTTVTQNNNSEFAWPGASSWALNGRNSLMNPGPAMASHKEGEDRFFPLSGSLIFGKQGTGRDNVDADKVMITNEEEIKTTNPVATESYGQVATNHQSAQAQAQTGWVQNQGILPGMVWQDRDVYLQGPIWAKIPHTDGNFHPSPLMGGFGMKHPPPQILIKNTPVPADPPTAFNKDKLDSFITQYSTGQVSVEIEWELQKENSKRWNPVIQYTSNYYKSNNVEFAVNTEGVYSEPRPIGTRYLTRNL

SEQ ID NO: 746 - protein, 736 aa, Artificial Sequence
  source: /note="Description of Artificial Sequence: Synthetic polypeptide"
MAADGYLPDWLEDNLSEGIREWWDLKPGAPKPKANQQKQDDGRGLVLPGYKYLGPFNGLDKGEPVNAADAAALEHDKAYDQQLKAGDNPYLRYNHADAEFQERLQEDTSFGGNLGRAVFQAKKRVLEPLGLVEEGAKTAPGKKRPVEQSPQEPDSSSGIGKTGQQPAKKRLNFGQTGDSESVPDPQPLGEPPATPAAVGPTTMASGGGAPMADNNEGVDGVGNASGNWHCDSTWLGDRVITTSTRTWALPTYNNHLYKQISSASTGASNDNHYFGYSTPWGYFDFNRFHCHFSPRDWQRLINNNWGFRPKRLNFKLFNIQVKEVTTNDGVTTIANNLTSTVQVFSDSEYQLPYVLGSAHQGCLPPFPADVFMIPQYGYLTLNNGSQAVGRSSFYCLEYFPSQMLRTGNNFTFSYTFEEVPFHSSYAHSQSLDRLMNPLIDQYLYYLNRTQNQSGSAQNKDLLFSRGSPAGMSVQPKNWLPGPCYRQQRVSKTKTDNNNSNFTWTGASKYNLNGRESIINPGTAMASHKDDEDKFFPMSGVMIFGKESAGASNTALDNVMITDEEEIKATNPVATERFGTVAVNFQSSSTDPATGDVHAMGALPGMVWQDRDVYLQGPIWAKIPHTDGHFHPSPLMGGFGLKNPPPQILIKNTPVPANPPAEFSATKLASFITQYSTGQVSVEIEWELQKENSKRWNPEVQYTSNYAKSANVDFTVDNNGLYTEPRPIGTRYLTRPL

SEQ ID NO: 747 - protein, 736 aa, Artificial Sequence
  source: /note="Description of Artificial Sequence: Synthetic polypeptide"
MAADGYLPDWLEDNLSEGIREWWDLKPGAPKPKANQQKQDDGRGLVLPGYKYLGPFNGLDKGEPVNAADAAALEHDKAYDQQLKAGDNPYLRYNHADAEFQERLQEDTSFGGNLGRAVFQAKKRVLEPLGLVEEGAKTAPGKRRPVEQSPQEPDSSSGIGKTGQQPAKKRLNFGQTGDSESVPDPQPLGEPPATPAAVGPTTMASGGGAPMADNNEGADGVGNASGNWHCDSTWLGDRVITTSTRTWALPTYNNHLYKQISSASTGASNDNHYFGYSTPWGYFDFNRFHCHFSPRDWQRLINNNWGFRPKRLNFKLFNIQVKEVTTNDGVTTIANNLTSTVQVFSDSEYQLPYVLGSAHQGCLPPFPADVFMIPQYGYLTLNNGSQAVGRSSFYCLEYFPSQMLRTGNNFTFSYTFEEVPFHSSYAHSQSLDRLMNPLIDQYLYYLNRTQNQSGSAQNKDLLFSRGSPAGMSVQPKNWLPGPCYRQQRVSKTKTDNNNSNFTWTGASKYNLNGRESIINPGTAMASHKDDEDKFFPMSGVMIFGKESAGASNTALDNVMITDEEEIKATNPVATERFGTVAVNFQSSSTDPATGDVHAMGALPGMVWQDRDVYLQGPIWAKIPHTDGHFHPSPLMGGFGLKNPPPQILIKNTPVPANPPAEFSATKFASFITQYSTGQVSVEIEWELQKENSKRWNPEVQYTSNYAKSANVDFTVDNNGLYTEPRPIGTRYLTRPL

SEQ ID NO: 748 - protein, 736 aa, Artificial Sequence
  source: /note="Description of Artificial Sequence: Synthetic polypeptide"
MAADGYLPDWLEDNLSEGIREWWDLKPGAPKPKANQQKQDDGRGLVLPGYKYLGPFNGLDKGEPVNAADAAALEHDKAYDQQLKAGDNPYPRYNHADAEFQERLQEDTSFGGNLGRAVFQAKKRVLEPLGLVGEGAKTAPGKKRPVEQSPQEPDSSSGIGKTGQQPAKKRLNFGQTGDSESVPDPQPLGEPPATPAAVGPTTMASGGGAPMADNNEGADGVGNASGNWHCDSTWLGDRVITTSTRTWALPTYNNHLYKQISSASTGASNDNHYFGYSTPWGYFDFNRFHCHFSPRDWQRLINNNWGFRPKRLNFKLFNIQVKEVTTNDGVTTIANNLTSTVQVFSDSEYQLPYVLGSAHQGCLPPFPADVFMIPQYGYLTLNNGSQAVGRSSFYCLEYFPSQMLRTGNNFTFSYTFEEVPFHSSYAHSQSLDRLMNPPIDQYLYYLNRTQNQSGSAQNKDLLFSRGSPAGMSVQPKNWLPGPCYRQQRVSKTKTDNNNSNFTWTGASKYNLNGRESIINPGTAMASHKDDEDKFFPMSGVMIFGKESAGASNTALDNVMITDEEEIKATNPVATERFGTVAVNFQSSSTDPATGDVHAMGALPGMVWQDRDVYLQGPIWAKIPHTDGHFHPSPLMGGFGLKNPPPQILIKNTPVPANPPAEFSATKFASFITQYSTGQVSVEIEWELQKENSKRWNPEVQYTSNYAKSANVDFTVDNNGLYTEPRPIGTRYLTRPL

SEQ ID NO: 749 - protein, 736 aa, Artificial Sequence
  source: /note="Description of Artificial Sequence: Synthetic polypeptide"
MAADGYLPDWLEDNLSEGIREWWDLKPGAPKPKANQQKQDDGRGLVLPGYKYLGPFNGLDKGEPVNAADAAALEHDKAYDQQLKAGDNPYLRYNHADAEFQERLQEDTSFGGNLGRAVFQAKKRVLEPLGLVEEGAKTAPGKKRPVEQSPQEPDSSSGIGKTGQQPAKKRLNFGQTGDSESVPDPRPLGEPPATPAAVGPTTMASGGGAPMADNNEGADGVGNASGNWHCDSTWLGDRVITTSTRTWALPTYNNHLYKQISSASTGASNDNHYFGYSTPWGYFDFNRFHCHFSPRDWQRLINNNWGFRPKRLNFKLFNIQVKEVTTNDGVTTIANNLTSTVQVFSDSEYQLPYVLGSAHQGCLPPFPADVFMIPQYGYLTLNNGSQAVGRSSFYCLEYFPSQMLRTGNNFTFSYTFEEVPFHSSYAHSQSLDRLMNPLIDQYLYYLNRTQNQSGSAQNKDLLFSRGPPAGMSVQPKNWLPGPCYRQQRVSKTKTDNNNSNFTWTGASKYNLNGRESIINPGTAMASHKDDEDKFFPMSGVMIFGKESAGASNTALDNVMITDEEEIKATNPVATERFGTVAVNFQSSSTDPATGDVHAMGALPGMVWQDRDVYLQGPIWAKIPHTDGHFHPSPLMGGFGLKNPPPQILIKNTPVPANPPAEFSATKFASFITQYSTGQVSVEIEWELQKENSKRWNPEVQYTSNYAKSANVDFTVDNNGLYTEPRPIGTRYLTRPL

SEQ ID NO: 750 - protein, 736 aa, Artificial Sequence
  source: /note="Description of Artificial Sequence: Synthetic polypeptide"
MAADGYLPDWLEDNLSEGIREWWDLKPGAPKPKANQQKQDDGRGLVLPGYKYLGPFNGLDKGEPVNAADAAALEHDKAYDQQLKAGDNPYLRYNHADAEFQERLQEDTSFGGNLGRAVFQAKKRVLEPLGLVEEGAKTAPGKKRPVEQSPQEPDSSSGIGKTGQQPAKKRLNFGQTGGSESVPDPQPLGEPPATPAAVGPTTMASGGGAPMADNNEGADGVGNASGNWHCDSTWLGDRVITTSTRTWALPTYNNHLYKQISSASTGASNDNHYFGYSTPWGYFDFNRFHCHFSPRDWQRLINNNWGFRPKRLNFKLFNIQVKEVTTNDGVTTIANNLTSTVQVFSDSEYQLPYVLGSAHQGCLPPFPADVFMIPQYGYLTLNNGSQAVGRSSFYCLEYFPSQMLRTGNNFTFSYTFEEVPFHSSYAHSQSLDRLMNPPIDQYLYYLNRTQNQSGSAQNKDLLFSRGSPAGMSVQPKNWLPGPCYRQQRVSKTKTDNNNSNFTWTGASKYNLNGRESIINPGTAMASHKDDEDKFFPMSGVMIFGKESAGASNTALDNVMITDEEEIKATNPVATERFGTVAVNFQSSSTDPATGDVHAMGALPGMVWQDRDVYLQGPIWAKIPHTDGHFHPSPLMGGFGLKNPPPQILIKNTPVPANPPAEFSATKFASFITQYSTGQVSVEIEWELQKENSKRWNPEVQYTSNYAKSANVDFTVDNNGLYTEPRPIGTRYLTRPL

SEQ ID NO: 751 - protein, 736 aa, Artificial Sequence
  source: /note="Description of Artificial Sequence: Synthetic polypeptide"
MAADGYLPDWLEDNLSEGIREWWDLKPGAPKPKANQQKQDDGRGLVLPGYKYLGPFNGLDKGEPVNAADAAALEHDKAYDQQLKAGDNPYLRYNHADAEFQERLQEDTSFGGNLGRAVFQAKKRVLEPLGLVEEGAKTAPGKKRPVEQSPQEPDSSSGIGKTGQQPAKKRLNFGQTGDSESVPDPQPLGEPPATPAAVGPTTMASGGGAPMADNNEGADGVGNASGNWHCDSTWLGDRVITTSTRTWALPTYNNHLYKQISSASTGASNDNHYFGYSTPWGYFDFNRFHCHFSPRDWQRLINNNWGFRPKRLNFKLFNIQVKEVTTNDGVTTIANNLTSTVQVFSDSEYQLPYVLGSAHQGCLPPFPADVFMIPQYGYLTLNNGSQAVGRSSFYCLEYFPSQMLRTGNNFTFSYTFEEVPFHSSYAHSQSLDRLMNPLIDQYLYYLNRTQNQSGSAQNKDLLFSRGSPAGMSVQPKNWLPGPCYRQQRVSKTKTDNNNSNFTWTGASKYNLNGRESIINPGTAVASHKDDEDKFFPMSGVMIFGKESAGASNTALDNVMITDEEEIKATNPVATERFGTVAVNFQSSSTDPATGDVHAMGALPGMVWQDRDVYLQGPIWAKIPHTDGHFHPSPLMGGFGLKNPPPQILIKNTPVPANPPAEFSATKFASFITQYSTGQVSVEIEWELQKENSKRWNPEVQYTSNYAKSANVDFTVDNNGLYTEPRPIGTRYLTRPL

SEQ ID NO: 752 - protein, 736 aa, Artificial Sequence
  source: /note="Description of Artificial Sequence: Synthetic polypeptide"
MAADGYLPDWLEDNLSEGIREWWDLKPGAPKPKANQQKQDDGRGLVLPGYKYLGPFNGLDKGEPVNAADAAALEHDKAYDQQLKAGDNPYLRYNHADAEFQERLQEDTSFGGNLGRAVFQAKKRVLEPLGLVEEGAKTAPGKKRPVEQSPQEPDSSSGIGKTGQQPAKKRLNFGQTGDSESVPDPQPLGEPPATPAAVGPTTMASGGGAPMADNNEGADGVGNASGNWHCDSTWLGDRVITTSTRTWALPTYNNHLYKQISSASTGASNDNHYFGYSTPWGYFDFNRFHCHFSPRDWQQLINNNWGFRPKRLNFKLFNIQVKEVTTNDGVTTIANNLTSTVQVFSDSEYQLPYVLGSAHQGCLPPFPADVFMIPQYGYLTLNNGSQAVGRSSFYCLEYFPSQMLRTGNNFTFSYTFEEVPFHSSYAHSQSLDRLMNPLIDQYLYYLNRTQNQSGSAQNKDLLFSRGSPAGMSVQPKNWLPGPCYRQQRVSKTKTDNNNSNFTWTGASKYNLNGRESIINPGTAMASHKDDEDKFFPMSGVMIFGKESAGASNTALDNVMITDEEEIKATNPVATERFGTVAVNFQSTSTDPATGDVHAMGALPGMVWQDRDVYLQGPIWAKIPHTDGHFHPSPLMGGFGLKNPPPQILIKNTPVPANPPAEFSATKFASFITQYSTGQVSVEIEWELQKENSKRWNPEVQYTSNYAKSADVDFTVDNNGLYTEPRPIGTRYLTRPL

SEQ ID NO: 753 - protein, 736 aa, Artificial Sequence
  source: /note="Description of Artificial Sequence: Synthetic polypeptide"
MAADGYLPDWLEDNLSEGIREWWDLKPGAPKPKANQQKQDDGRGLVLPGYKYLGPFNGLDKGEPVNAADAAALEHDKAYDQQLKAGDNPYLRYNHADAEFQERLQEDTSFGGNLGRAVFQAKKRVLEPLGLVEEGAKTAPGKKRPVEQSPQEPDSSSGIGKTGQQPAKKRLNFGQTGDSESVPDPQPLGEPPATPAAVGPTTMASGGGAPMADNNEGADGVGNASGNWHCDSTWLGDRVITTSTRTWALPTYNNHLYKQISSASTGASNDNHYFGYSTPWGYFDFNRFHCHFSPRDWQRLINNNWGFRPKRLNFKLFNIQVKEVTTNDGVTTIANNLTSTVQVFSDSEYQPPYVLGSAHQGCLPPFPADVFMIPQYGHLTLNNGSQAVGRSSFYCLEYFPSQMLRTGNNFTFSYTFEEVPFHSSYAHSQSLDRLTNPLIDQYLYYLNRTQNQSGSAQNKDLLFSRGSPAGMSVQPKNWLPGPCYRQQRVSKTKTDNNNSNFTWTGASKYNLNGRESIINPGTAMASHKDDEDKFFPMSGVMIFGKESAGASNTALDNVMITDEEEIKATNPVATERFGTVAVNFQSSSTDPATGDVHAMGALPGMVWQDRDVYLQGPIWAKIPHTDGHFHPSPLMGGFGLKNPPPQILIKNTPVPANPPAEFSATKFASFITQYSTGQVSVEIEWELQKENSKRWNPEVQYTSNYAKSANVDFTVDNNGLYTEPRPIGTRYLTRPL

SEQ ID NO: 754 - protein, 736 aa, Artificial Sequence
  source: /note="Description of Artificial Sequence: Synthetic polypeptide"
MAADGYLPDWLEDNLSEGIREWWDLKPGAPKPKANQQEQDDGRGLVLPGYKYLGPFNGLDKGEPVNAADAAALEHDKAYDQQLKAGDNPYLRYNHADAEFQERLQEDTSFGGNLGRAVFQAKKRVLEPLGLVEEGAKTAPGKKRPVEQSPQEPDSSSGIGKTGQQPAKKRLNFGQTGDSESVPDPQPLGEPPATPAAVGPTTMASGGGAPMADNNEGADGVGNASGNWHCDSTWLGDRVITTSTRTWALPTYNNHLYKQISSASTGASNDNHYFGYSTPWGYFDFNRFHCHFSPRDWQRLINNNWGFRPKRLNFKLFNIQVKEVTTNDGVTTIANNLTSTVQVFSDSEYQLPYVLGSAHQGCLPPFPADVFMIPQYGYLTLNNGSQAVGRSSFYCLEYFPSQMLRTGNNFTFSYTFEEVPFHSSYAHSQSLDRLMNPLIDQYLYYLNRTQNQSGSAQNKDLLFSRGSPAGMSVQPKNWLPGPCYRQQRVSKTKTDNNNSNFTWTGASKYNLNGRESIINPGTAMASHKDDEDKFFPMSGVMIFGKESAGASNTALDNVMITDEEEIKATNPVATERFGTVAVNFQSSSTDPATGDVHATGTLPGMVWQDRDVYLQGPIWAKIPHTDGHFHPSPLMGGFGLKNPPPQILIKTTPVPANPPAEFSATKFASFITQYSTGQVSVEIEWELQKENSKRWNPEVQYTSNYAKSANVDFTVDDNGLYTEPRPIGTRYLTRPL

SEQ ID NO: 755 - protein, 736 aa, Artificial Sequence
  source: /note="Description of Artificial Sequence: Synthetic polypeptide"
MAADGYLPDWLEDNLSEGIREWWDLKPGAPKPKANQQKQDDGRGLVLPGYKYLGPFNGLDKGEPVNAADAAALEHDKAYDQQLKAGDNPYLRYNHADAEFQERLQEDTSFGGNLGRAVFQAKKRVLEPLGLVEEGAKTAPGKKRPVEQSLQEPDSSSGIGKTGQQPAKKRLNFGQTGDSESVPDPQPLGEPPATPAAVGPTTMASGGGAPMADNNEGADGVGNASGNWHCDSTWLGDRVITTSTRTWALPTYNNHLYKQISSASTGASNDNHYFGYSTPWGYFDFNRFHCHFSPRDWQRLINNNWGFRPKRLNFKLFNIQVKEVTTNDGVTTIANNLTSTVQVFSDSEYQLPYVLGSAHQGCLPPFPADVFMIPQYGYLTLNNGSQAVGRSSFYCLEYFPSQMLRTGNNFTFSYTFEEVPFHSSYAHSQSLDRLMNPLIDQYLYYLNRTQNQSGSAQNKDLLFSRGSPAGMSVQPKNWLPGPCYRQQRVSKTKTDNDNSNFTWTGASKYNLNGRESIINPGTAMASHKDDEDKFFPMSGVMIFGKESAGASNTALDNVMITDEEEIKATNPVATERFGTVAVNFQSSSTDPATGDVHAMGALPGMVWQDRDVYLQGPIWAKIPHTDGHFHPSPLMGGFGLKNPPPQILIKNTPVPANPPAEFSATKFASFITQYSTGQVSVEIEWELQKENSKRWNPEVQYTSNYAKSANVDFTVDNNGLYTEPRPIGTRYLTRPL

SEQ ID NO: 756 - protein, 736 aa, Artificial Sequence
  source: /note="Description of Artificial Sequence: Synthetic polypeptide"
MAADGYLPDWLEDNLSEGIREWWDLKPGAPKPKANQQKQDDGRGLVLPGYKYLGPFNGLDKGEPVNAADAAALEHDKAYDQQLKAGDNPYLRYNHADAEFQERLQEDTSFGGNLGRAVFQAKKRVLEPLGLVEEGAKTAPGKKRPVEQSPQEPDSSSGIGKTGQQPAKKRLNFGQTGDSESVPDPQPLGEPPATPAAVGPTTMASGGGAPMADNNEGADGVGNASGNWHCDSTWLGDRVITTSTRTWALPTYNNHLYKQISSASTGASNDNHYFGYSTPWGYFDFNRFHCHFSPRDWQRLINNNWGFRPKRLNFKLFNIQVKEVTTNDGVTTIANNLTSTVQVFSDSEYQLPYVLGSAHQGCLPPFPADVFMIPQYGYLTLNNGSQAVGRSSFYCLEYFPSQMLRTGNNFTFSYTFEEAPFHSSYAHSQSLDRLMNPLIDQYLYYLNRTQNQSGSAQNKDLLFSRGSPAGMSVQPKNWLPGPCYRQQRVSKTKTDNNNSNFTWTGASKYNLNGRESIINPGTAMASHKDDEDKFFPMSGVMIFGKESAGASNTALDNVMITDEEEIKATNPVATERFGTVAVNFQSSSTDPATGDVHAMGALPGMVWQDRDVYLQGPIWAKIPHTDGHFHPSPLMGGFGLKNPPPQILIKNTPVPANPPAEFSATKFASFITQYSTGQVSVEIEWELQKENSKRWNPEVQYTSNYAKSANVDFTVDNNGLYTEPRPVGTRYLTRPL

SEQ ID NO: 757 - protein, 736 aa, Artificial Sequence
  source: /note="Description of Artificial Sequence: Synthetic polypeptide"
MAADGYLPDWLEDNLSEGIREWWDLKPGAPKPKANQQKQDDGRGLVLPGYKYLGPFNGLDKGEPVNAADAAALEHDKAYDQQLKAGDNPYLRYNHADAEFQERLQENTSFGGNLGRAVFQAKKRVLEPLGLVEEGAKTAPGKKRPVEQSPQEPDSSSGIGKTGQQPAKKRLNFGQTGDSESVPDPQPLGEPPATPAAVGPTTMASGGGAPMADNNEGADGVGNASGNWHCDSTWLGDRVITTSTRTWALPTYNNHLYKQISSASTGASNDNHYFGYSTPWGYFDFNRFHCHFPPRDWQRLINNNWGFRPKRLNFKLFNIQVKEVTSNDGVTTIANNLTSTVQVFSDSEYQLPYVLGSAHQGCLPPFPADVFMIPQYGYLTLNNGSQAVGRSSFYCLEYFPSQMLRTGNNFTFSYTFEEVPFHSSYAHSQSLDRLMNPLIDQYLYYLNRTQNQSGSAQNKDLLFSRGSPAGMSVQPKNWLPGPCYRQQRVSKTKTDNNNSNFTWTGASKYNLNGRESIINPGTAMASHKDDEDKFFPMSGVMIFGKESAGASNTALDNVMITDEEEIKATNPVATERFGTVAVNFQSSSTDPATGDVHAMGALPGMVWQDRDVYLQGPIWAKIPHTDGHFHPSPLMGGFGLKNPPPQILIKNTPVPANPPAEFSATKFASFITQYSTGQVSVEIEWELQKENSKRWNPEVQYTSNYAKSANVDFTVDNNGLYTEPRPIGTRYLTRPL

SEQ ID NO: 758 - protein, 736 aa, Artificial Sequence
  source: /note="Description of Artificial Sequence: Synthetic polypeptide"
MAADGYLPDWLEDNLSEGIREWWDLKPGAPKPKANQQKQDDGRGLVLPGYKYLGPFNGLDKGEPVNAADAAALEHDKAYDQQLKAGDNPYLRYNHADAEFQERLQEDTSFGGNLGRAVFQAKKRVLEPLGLVEEGAKTAPGKKRPVEQSPQEPDSSSGIGKTGQQPAKKRLNFGQTGDSESVPDPQPLGEPPATPAAVGPTTMASGGGAPMADNNEGADGVGNASGNWHCDSTWLGDRVITTSTRTWALPTYNNHLYKQISSASTGASNDNHYFGYSTPWGYFDFNRFHCHFSPRDWQRLINNNWGFRPKRLNFKLFNIQVKEVTTNDGVTTIANNLTSTVQVFSDSEYQLPYVLGSAHQGCLPPFPADVFMIPQYGYLTLNNGSQAVGRSSFYCLEYFPSQMLRTGNNFTFSYTFEEVPFHSSYAHSQSLDRLMNPLIDQYLYYLNRTQNQSGSAQNKDLLFSRGSPAGTSVQPKNWLPGPCYRQQRVSKTKTDNNNSNFTWTGASKYNLNGRESIINPGTAMASHKDDEDKFFPMSGVMIFGKESAGASNTALDNVMITDEEEIKATNPVATERFGTVAVNFQSSSTDPATGDVHAMGALPGMVWQDRDVYLQGPIWAKIPHTDGHFHPSPLMGGFGLKNPPPQILIKNTPVPANPPAEFSATKFASFITQYSTGQVSVEIEWELQKENSKRWNPEVQYTSNYAKSANVDFTVDNNGLYTGPRPIGTRYLTRPL

SEQ ID NO: 759 - protein, 736 aa, Artificial Sequence
  source: /note="Description of Artificial Sequence: Synthetic polypeptide"
MAADGYLPDWLEDNLSEGIREWWDLKPGAPKPKANQQKQDDGRGLVLPGYKYLGPFNGLDKGEPVNAADAAALEHDKAYDQQLKAGDNPYLRYNHADAEFQERLQEDTSFGGNLGRAVFQAKKRVLEPLGLVEEGAKTAPGKKRPVEQSPQEPDSSSGIGKTGQQPAKKRLNFGQTGDSESVPDPQPLGEPPATPAAVGPTTMASGGGAPMADNNEGADGVGNAPGNWHCDSTWLGDRVITTSTRTWALPTYNNHLYKQISSASTGASNDNHYFGYSTPWGYFDFNRFHCHFSPRDWQRLINNNWGFRPKRLNFKLFNIQVKEVTTNDGVTTIANNLTSTVQVFSDSEYQLPYVLGSAHQGCLPPFPADVFMIPQYGYLTLNNGSQAVGRSSFYCLEYFPSQMLRTGNNFTFSYTFEEVPFHSSYAHSQSLDRLMNPLIDQYLYYLNRTQNQSGSAQNKDLLFSRGSPAGMSVQPKNWLPGPCYRQQRVSKTKTDNNNSNFTWTGASKYNLNGRESIINPGTAMASHKDDEDKFFPMSGVMIFGKESAGASNTALDNVMITGEEEIKATNPVATERFGTVAVNFQSSSTDPATGDVHAMGALPGMVWQDRDVYLQGPIWAKIPHTDGHFHPSPLMGGFGLKNPPPQILIKNTPVPANPPAEFSATKFASFITQYSTGQVSVEIEWELQKENSKRWNPEVQYTSNYAKSANVDFTVDNNGLYTEPRPIGTRYLTRPL

SEQ ID NO: 760 - protein, 736 aa, Artificial Sequence
  source: /note="Description of Artificial Sequence: Synthetic polypeptide"
MAADGYLPDWLEDNLSEGIREWWDLKPGAPKPKANQQKQDDGRGLVLPGYKYLGPFNRLDKGEPVNAADAAALEHDKAYDQQLKAGDNPYLRYNHADAEFQERLQEDTSFGGNLGRAVFQAKKRVLEPLGLVEEGAKTAPGRKRPVEQSPQEPDSSSGIGKTGQQPAKKRLNFGQTGDSESVPDPQPLGEPPATPAAVGPTTMASGGGAPMADNNEGADGVGNASGNWHCDSTWLGDRVITTSTRTWALPTYNNHLYKQISSASTGASNDNHYFGYSTPWGYFDFNRFHCHFSPRDWQRLINNNWGFRPKRLNFKLFNIQVKEVTTNDGVTTIANNLTSTVQVFSDSEYQLPYVLGSAHQGCLPPFPADVFMIPQYGYLTLNNGGQAVGRSSFYCLEYFPSQMLRTGNNFTFSYTFEEVPFHSSYAHSQSLDRLMNPLIDQYLYYLNRTQNQSGSAQNKDLLFSRGSPAGMSVQPKNWLPGPCYRQQRVSKTKTDNNNSNFTWTGASKYSLNGRESIINPGTAMASHKDDEDKFFPMGGVMIFGKESAGASNTALDNAMITDEEEIKATNPVATERFGTVAVNFQSSSTDPATGDVHAMGALPGMVWQDRDVYLQGPIWAKIPHTDGHFHPSPLMGGFGLKNPPPQILIKNTPVPANPPAEFSATKFASFITQYSTGQVSVEIEWELQKENSKRWNPEVQYTSNYAKSANVDFTVDNNGLYTEPRPIGTRYLTRPL

SEQ ID NO: 761 - protein, 736 aa, Artificial Sequence
  source: /note="Description of Artificial Sequence: Synthetic polypeptide"
MAADGYLPDWLEDNLSEGIREWWDLKPGAPKPKANQQKQDDGRGLVLPGYKYLGPFNGLDKGEPVNAADAAALEHDKAYDQQLKAGDNPYLRYNHADAEFQERLQEDTSFGGNLGRAVFQAKKRVLEPLGLVEEGAKTAPGKKRPVEQSPQEPDSSSGIGKTGQQPAKKRLNFGQTGDSESVPDPQPLGEPPATPAAVGPTTMASGGGAPMADNNEGADGVGNASGNWHCDSTWLGGRVITTSTRTWALPTYNNHLYKQISSASTGASNDNHYFGYSTPWGYFDFNRFHCHFSPRDWQRLINNNWGFRPKRLNFKLFNIQVKEVTTNDGVTTIANNLTSTVQVFSDSEYQLPYVLGSAHQGCLPPFPADVFMIPQYGYLTLNNGSQAVGRSSFYCLEYFPSQMLRTGNNSTFSYTFEEVPFHSSYAHSQSLDRLMNPLIDQYLYYLNRTQNQSGSAQNKDLLFSRGSPAGMSVQPKNWLPGPCYRQQRVSKTKTDNNNSNFTWTGASKYNLNGRESIINPGTAMASHKDDEDKFFPMSGVMIFGKESAGASNTALDNVMITDEEEIKATNPVATERFGTVAVNFQSSSTDPATGDVHAMGTLPGMVWQDRDVYLQGPIWAKIPHTDGHFHPSPLMGGFGLKNPPPQILIKNTPVPANPPAEFSATKFASFITQYSTGQVSVEIEWELQKENSKRWNPEVQYTSNYAKSANVDFTVDNNGLYTEPRPIGTRYLTRPL

SEQ ID NO: 762 - protein, 736 aa, Artificial Sequence
  source: /note="Description of Artificial Sequence: Synthetic polypeptide"
MAADGYLPDWLEDNLSEGIREWWDLKPGAPKPKANQQKQDDGRGLVLPGYKYLGPFNGLDKGEPVSAADAAALEHDKAYDQQLKAGDNPYLRYNHADAEFQERLQEDTSFGGNLGRAVFQAKKRVLEPLGLVEEGAKTAPGKKRPVEQSPQEPDSSSGIGKTGQQPAKERLNFGQTGDSESVPDPQPLGEPPATPAAVGPTTMASGGGAPMADNNEGADGVGNASGNWHCDSTWLGDRVITTSTRTWALPTYNNHLYKQISSASTGASNDNHYFGYSTPWGYFDFNRFHCHFSPRDWQRLINNNWGFRPKRLNFKLFNIQVKEVTTNDGVTTIANNLTSTVQVFSDSEYQLPYVLGSAHQGCLPPFPADVFMIPQYGYLTLNNGSQAVGRSSFYCLEYFPSQMLRTGNNFTFSYTFEEVPFHSSYAHSQSLDRLMNPLIDQYLYYLNRTQNQSGSAQNKDLLFSRGSPAGMSVQPKNWLPGPCYRQQRVSKTKTDNNNSNFTWTGASKYNLNGRESIINPGTAMASHKDDEDKFFPMSGVMIFGKESAGASNTALDNVMITDEEEIKATNPVATERFGTVAVNFQSSSTDPATGDVHAMGALPGMVWQDRDVYLQGPIWAKIPHTDGHFHPSPLMGGFGLKNPPPQILIKNTPVPANPPAEFSATKFASFITQYSTGQVSVEIEWELQKENSKRWNPEVQYTSNYAKSANVDFTVDNNGLYTEPRPIGTRYLTRPL

SEQ ID NO: 763 - protein, 736 aa, Artificial Sequence
  source: /note="Description of Artificial Sequence: Synthetic polypeptide"
MAADGYLPDWLEDNLSEGIREWWDLKPGAPKPKANQQKQDDGRGLVLPGYKYLGPFNGLDKGEPVNAADAAALEHDKAYDQQLKAGDNPYLRYNHADAEFQERLQEDTSFGGNLGRAVFQAKKRVLEPLGLVEEGAKTAPGKKRPVEQSPQEPDSSSGIGKTGQQPAKKRLNFGQTGDSESVPDPQPLGEPPATPAAVGPTTMASGGGAPMADNNEGADGVGNASGNWHCDSTWLGDRVITTSTRTWALPTYNNHLYKQISSASTGASNDNHYFGYSTPWGYFDFNRFHCHFSPRDWQRLINNNWGFRPKRLNFKLFNIQVKEVTTNDGVTTIANNLTSTVQVFSDSEYQLPYVLGSAHQGCLPPFPADVFMIPQYGYLTLNNGSQAVGRSSFYCLEYFPSQMLRTGNNFTFSYTFEEVPFHSSYAHSQSLDRLMNPLIDQYLYYLNRTQNQSGSAQNKDLLFSRGSPAGMSVQPKNWLPGPCYRQQRVSKTKTDNNNSNFTWTGASKYNLNGRESIINPGTAMASHKDDEDKFFPMSGVMIFGKESAGASNTALDNVMITDEGEIKATNPVATERFGTVAVNFQSSSTDPATGDVHAMGALPGMVWQDRDVYLQGPIWAKIPHTDGHFHPSPLMGGFGLKNPPPQILIKNTPVPANPPAEFSATKFASFITQYSTGQVSVEIEWELQKENSKRWNPEVQYTSNYAKSANVDFTVDNNGLYTEPRPIGTRYLTRPL

SEQ ID NO: 764 - protein, 736 aa, Artificial Sequence
  source: /note="Description of Artificial Sequence: Synthetic polypeptide"
MAADGYLPDWLEDNLSEGIREWWDLKPGAPKPKANQQKQDDGRGLVLPGYKYLGPFNGLDKGEPVNAADAAALEHDKAYDQQLKAGDNPYLRYNHADAEFQERLQEDTSFGGNLGRAVFQAKKRVLEPFGLVEEGAKTAPGKKRPVEQSPQEPDSSSGIGKTGQQPAKKRLNFGQTGDSESVPDPQPLGEPPATPAAVGPTTMASGGGAPMADNNEGADGVGNASGNWHCDSTWLGDRVITTSTRTWALPTYNNHLYKQISSASTGASNDNHYFGYSTPWGYFDFNRFHCHFSPRDWQRLINNNWGFRPKRLNFKLFNIQVKEVTTNDGVTTIANNLTSTVQVFSDSEYQLPYVLGSAHQGCLPPFPADVFMIPQYGYLTLNNGSQAVGRSSFYCPEYFPSQMLRTGNNFTFSYTFEEVPFHSSYAHSQSLDRLMNPLIDQYLYYLNRTQNQSGSAQNKDLLFSRGSPAGMSVQPKNWLPGPCYRQQRVSKTKTDNNNSNFTWTGASKYNLNGRESIINPGTAMASHKDDKDKFFPMSGVMIFGKESAGASNTALDNVMITDEEEIKATNPVATERFGTVAVNFQSSNTDPATGDVHVMGALPGMVWQDRDVYLQGPIWAKIPHTDGHFHPSPLMGGFGLKHPPPQILIKNTPVPANPPAEFSATKFASFITQYSTGQVSVEIEWELQKENSKRWNPEVQYTSNYAKSANVDFTVDNNGLYTEPRPIGTRYLTRPL

SEQ ID NO: 765 - protein, 736 aa, Artificial Sequence
  source: /note="Description of Artificial Sequence: Synthetic polypeptide"
MAADGYLPDWLEDNLSEGIREWWDLKPGAPKPKANQQKQDDGRGLVLPGYKYLGPFNGLDKGEPVNAADAAALEHDKAYDQQLKAGDNPYLRYNHADAEFQERLQEDTSFGGNLGRAVFQAKKRVLEPFGLVEEGAKTAPGKKRPVEQSPQEPDSSSGIGKTGQQPAKKRLNFGQTGDSESVPDPQPLGEPPATPAAVGPTTMASGGGAPMADNNEGADGVGNASGNWHCDSTWLGDRVITTSTRTWALPTYNNHLYKQISSASTGASNDNHYFGYSTPWGYFDFNRFHCHFSPRDWQRLINNNWGFRPKRLNFKLFNIQVKEVTTNDGVTTIANNLTSTVQVFSDSEYQLPYVLGSAHQGCLPPFPADVFMIPQYGYLTLNNGSQAVGRSSFYCLEYFPSQMLRTGNNFTFSYTFEEVPFHSSYAHSQSLDRLMNPLIDQYLYYLNRTQNQSGSAQNKDLLFSRGSPAGMSVQPKNWLPGPCYRQQRVSKTKTDNNNSNFTWTGASKYNLNGRESIINPGTAMASHKDDKDKFFPMSGVMIFGKESAGASNTALDNVMITDEEEIKATNPVATERFGTVAVNFQSSDTDPATGDVHVMGALPGMVWQDRDVYLQGPIWAKIPHTDGHFHPSPLMGGFGLKHPPPQILIKNTPVPANPPAEFSATKFASFITQYSTGQVSVEIEWELQKENSKRWNPEVQYTSNYAKSANVDFTVDNNGLYTEPRPIGTRYLTRPL

SEQ ID NO: 766 - protein, 736 aa, Artificial Sequence
  source: /note="Description of Artificial Sequence: Synthetic polypeptide"
MAADGYLPDWLEDNLSEGIREWWDLKPGAPKPKANQQKQGDGRGLVLPGYKYLGPFNGLDKGEPVNAADAAALEHDKAYDQQLKAGDNPYLRYNHADAEFQERLQEDTSFGGNLGRAVFQAKKRVLEPFGLVEEGAKTAPGKKRPVEQSPQEPDSSSGIGKTGQQPAKKRLNFGQTGDSESVPDPQPLGEPPATPAAVGPTTMASGGGAPMADNNEGADGVGNASGNWHCDSTWLGDRVITTNTRTWALPTYNNHLYKQISSASTGASNDNHYFGYSTPWGYFDFNRFHCHFSPRDWQRLINNNWGFRPKRLNFKLFNIQVKEVTTNDGVTTIANNLTSTVQVFSDSEYQLPYVLGSAHQGCLPPFPADVFMIPQYGYLTLNNGSQAVGRSSFYCLEYFPSQMLRTGNNFTFSYTFEEVPFHSSYGHSQSLDRLMNLLIDQYLYYLNRTQNQSGSAQNKDLLFSRGSPAGMFVQPKNWLPGPCYRQQRVSKTKTDNNNSNFTWTGASKYNLNGRESIINPGTAMASHKDDEDKFFPMSGVMIFGKESAGASNTALDNVMITDEEEIKATNPVATERFGTVAVNFQSSSTDPATGDVHVMGALPGMVWQDRDVYLQGPIWAKIPHTDGHFHPSPLMGGFGLKHPPPQILIKNTPVPANPPAEFSATKFASFITQYSTGQVSVEIEWELQKENSKRWNPEVQYTSNYAKSANVDFTVDNNGLYTEPRPIGTRYLTRPL

SEQ ID NO: 767 - protein, 736 aa, Artificial Sequence
  source: /note="Description of Artificial Sequence: Synthetic polypeptide"
MAADGYLPDWLEDNLSEGIREWWDLKPGAPKPKANQQKQDDGRGLVLPGYKYLGPFNGLDKGEPVNAADAAALEHDKAYDQQLKAGDNPYLRYNHADAEFQERLQEDTSFGGNLGRAVFQAKKRVLEPFGLVEEGAKTAPGKKRPVEQSPQEPDSSSGIGKTGQQPAKKRLNFGQTGDSESVPDPQPLGEPPATPAAVGPTTMASGGGAPMADNNEGADGVGNASGNWHCDSTWLGDRVITTNTRTWALPTYNNHLYKQISSASTGASNDNHYFGYSTPWGYFDFNRFHCHFSPRDWQRLINNNWGFRPKRLNFKLFNIQVKEVTTNDGVTTIANNLTSTVQVFSDSEYQLPYVLGSAHQGCLPPFPADVFMIPQYGYLMLNNGSQAVGRSSFYCLEYFPSQMLRTGNNFTFSYTFEEVPFHSSYAHSQSLDRLMNPLIDQYLYYLNRTQNQSGSAQNKDLLFSRGSPAGMSVQPKNWLPGPCYRQQRVSKTKTDNNNSNFTWTGASKYNLNGRESIINPGTAMASHKDDEDKFFPMSGVMIFGKESAGASNTALDNVMITDEEEIKATNPAATERFGTVAVNFQSSSTDPATGDVHVMGALPGMVWQDRDVYLQGPIWAKIPHTDGHFHPSPLMGGFGLKHPPPQILIKNTPVPANPPAEFSATKFASFITQYSTGQVSVEIEWELQKENSKRWNPEVQYTSNYAKSANVDFTVDNNGLYTEPRPIGTRYLTRPL

SEQ ID NO: 768 - protein, 736 aa, Artificial Sequence
  source: /note="Description of Artificial Sequence: Synthetic polypeptide"
MAADGYLPDWLEDNLSEGIREWWDLKPGAPKPKANQQKQDDGRGLVLPGYKYLGPFNGLDKGEPVNAADAAALEHDKAYDQQLKAGDNPYLRYNHADAEFQERLQEDTSFGGNLGRAVFQAKKRVLEPFGLVEEGAKTAPGKKRPVEQSPQEPDSSSGIGKTGQQPAKKRLNFGQTGDSESVPDPQPLGEPPATPAAVGPTTMASGGGAPMADNNEGADGVGNASGNWHCDSTWLGDRVITTSTRTWALPTYNNHLYKQISSASTGASNDNHYFGYSTPWGYFDFNRFHCHFSPRDWQRLINNNWGFRPKRLNFKLFNIQVKEVTTNDGVTTIANNLTSTVQVFSDSEYQLPYVLGSAHQGCLPPFPADVFMIPQYGYLTLNNGSQAVGRSSFYCLEYFPSQMLRTGNNFTFSYTFEEVPFHSSYAHSQSLDRLMNPLIDQYLYYLNRTQNQSGSAQNKDLLFSRGSPAGMSVQPKNWLPGPCYRQQRVSKTKTDNNNSNFTWTGASKYNLNGRESIINPGTAMASHKDDEDKFFPMSGVMIFGKESAGASNTALDNVMITDEEEIKATNPVATERFGTVAVNFQSSSTDPATGDVHVMGALPGMVWQDRDVYLQGPIWAKIPHTDGHFHPSPLMGGFGLKHPPPQILIKNTPVPANPPAEFSATKFASFITQYSTGQVSVEIEWELQKENSKRWNPEVQYTSNYAKSANVDFTVDNNGLYTEPRPIGTRYLTRPL

SEQ ID NO: 769 - protein, 736 aa, Artificial Sequence
  source: /note="Description of Artificial Sequence: Synthetic polypeptide"
  MOD_RES (102)..(102): Any amino acid
MAADGYLPDWLEDNLSEGIREWWDLKPGAPKPKANQQKQDDGRGLVLPGYKYLGPFNGLDKGEPVNAADAAALEHDKAYDQQLKAGDNPYLRYNHADAEFQXRLQEDTSFGGNLGRAVFQAKKRVLEPFGLVEEGAKTAPGKKRPVEQSPQEPDSSSGIGKTGQQPAKKRLNFGQTGDSESVPDPQPLGEPPATPAAVGPTTMASGGGAPMADNNEGADGVGNASGNWHCDSTWLGGRVITTSTRTWALPTYNNHLYKQISSASTGASNDNHYFGHSTPWGYFDFNRFHCHFSPRDWQRLINNNWGFRPKRLNFKLFNIQVKEVTTNDGVTTIANNLTSTVQVFSDSEYQLPYVLGSAHQGCLPPSPADVFMIPQYGYLTLNNGSQAVGRSSFYCLEYFPSQMLRTGNNFTFSYTFEEVPFHSSYAHSQSLDRLMNPLIDQYLYYLNRTQNQSGSAQNKDLLFSRGSPAGMSVQPKNWLPGPCYRQQRVSKTKTDNNNSNFTWTGASKYNLNGRESIINPGTAMASHKDDKDKFFPMSGVMIFGKESAGASNTALDNVMITDEEEIKATNPVATERFGTVAVNFQSSNTDPATGDVHVMGALPGMVWQDRDVYLQGPIWAKIPHTDGHFHPSPLMGGFGLKHPPPQILIKNTPVPANPPAEFSATKFASFITQYSTGQVSVEIEWELQKENSKRWNPEVQYTSNYAKSANVDFTVDNNGLYTEPRPIGTRYLTRPL

SEQ ID NO: 770 - protein, 736 aa, Artificial Sequence
  source: /note="Description of Artificial Sequence: Synthetic polypeptide"
MAADGYFPDWLEDNLSEGIREWWDLKPGAPKPKANQQKQDDGRGLVLPGYKYLGPFNGLDKGEPVNAADAAALEHDKAYDQQLKAGDNPYLRYNHADAEFQERLQEDTSFGGNLGRAVFQAKKRVLEPFGLVEEGAKTAPGKKRPVEQSPQEPDSSSGIGRTGQQPAKKRLNFGQTGDSESVPDPQPLGEPPATPAAVGPTTMASGGGAPMADNNEGADGVGNASGNWHCDSTWLGDRVITTSTRTWALPTYNNHLYKQISSASTGASNDNHYFGYSTPWGYFDFNRFHCHFSPRDWQRLINNNWGFRPKRLNFKLFNIQVKEVTTNDGVTTIANNLTSTVQVFSDSEYQLPYVLGSAHQGCLPPFPADVFMIPQYGYLTLNNGSQAVGRSSFYCLEYFPSQMLRTGNNFTFSYTFEEVPFHSSYAHSQSLDRLMNPLIDQYLYYLNRTQNQSGSAQNKDLLFSRGSPAGMSVQPKNWLPGPCYRQQRVSKTKTDNNNSNFTWTGASKYNLNGRESIINPGTAMASHKDDEDKFFPMSGVMIFGKESAGASNTALDNVMITDEEEIKATNPVATERFGTVAVNFQSSSPDPATGDVHVMGALPGMVWQDRDVYLQGPIWAKIPHTDGHFHPSPLMGGFGLKHPPPQILIKNTPVPANPPAEFSATKFASFITQYSTGQVSVEIEWELQKENSKRWNPEVQYTSNYAKSANVDFTVDNNGLYSEPRPIGTRYLTRPL

SEQ ID NO: 771 - protein, 736 aa, Artificial Sequence
  source: /note="Description of Artificial Sequence: Synthetic polypeptide"
MAADGYLPDWLEDNLSEGIREWWDLKPGAPKPKANQQKQDDGRGLVLPGYKYLGPFNGLDKGEPVNAADAAALEHDKAYDQQLKAGDNPYLRYNHADAEFQERLQEDTSFGGNLGRAVFQAKKRVLEPFGLVEEGAKTAPGKKRPVEQSPQEPDSSSGIGKTGQQPAKKRLNFGQTGDSESVPDPQPLGEPPATPAAVGPTTMASGGGAPMADNNEGADGVGNASGNWHCDSTWLGDRVITTSTRTWALPTYNNHLYKQTSSASTGASNDNHYFGYSTPWGYFDFNRFHCHFSPRDWQRLINNNWGFRPKRLNFKLFNIQVKEVTTNDGVTTIANNLTSTVQVFSDSEYQLPYVLGSAHQGCLPPFPADVFMIPQYGYLTLNNGSQAVGRSSFYCLEYFPSQMLRTGNNFTFSYTFEEVPFHSSYAHSQSLDRLMNPLIDQYLYYLNRTQNQSGSAQNKDLLFSRGSPAGMSVQPKNWLPGPCYRQQRVSKTKTDYNNSNFTWTGASKYNLNGRESIINPGTAMASHKDDEDKFFPMSGVMIFGKESAGASNTALDNVMITDEEEIKATNPVATERFGTVAVNFQSSSTDPATGDVHVMGALPGMVWQDRDVYLQGPIWAKIPHTDGHFHPSPLMGGFGLKHPPPQILIKNTPVPANPPAEFSATKFASFITQYSTGQVSVEIEWELQKENSKRWNPEVQYTSNYAKSANVDFTVDNNGLYTEPRPIGTRYLTRPL

SEQ ID NO: 772 - protein, 736 aa, Artificial Sequence
  source: /note="Description of Artificial Sequence: Synthetic polypeptide"
MAADGYPPDWLEDNLSEGIREWWDLKPGVPKPKANQQKQDDGRGLVLPGYKYLGPFNGLDKGEPVNAADAAALEHDKAYDQQLKAGDNPYLRYNHADAEFQERLQEDTSFGGNLGRAVFQAKKRVLEPFGLVEEGAKTAPGKKRPVEQSPQEPDSSSGIGKTGQQPAKKRLNFGQTGDSESVPDPQPLGEPPATPAAVGPTTMASGGGAPMADNNEGADGVGNASGNWHCDSTWLGDRVITTSTRTWALPTYNNHLYKQISSASTGASNDNHYFGYSTPWGYFDFNRFHCHFSPRDWQRLINNNWGFRPKRLNFKLFNIQVKEVTTNDGVTTIANNLTSTVQVFSDSEYQLPYVLGSAHQGCLPPFPADVFMIPQYGYLTLNNGSQAVGRSSFYCLEYFPSQMLRTGNNFTFSYTFEEVPFHSSYAHSQSLDRLMNPLIDQYLYYLNRTQNQSGSAQNKDLLFSRGSPAGMSVQPKNWLPGPCYRQQRVSKTKTDNNNSNFTWTGASKYNLNGRESIINPGTAMASHKDDEDKFFPMSGVMIFGKESAGASNTALDNVMITDEEEIKATNPVATERFGTVAVNFQSSSTDPATGDVHVMGALPGMVWQDRDVYLQGPIWAKIPHTDGHFHPSPLMGGFGLKHPPPQILIKNTPVPANPPAEFSATKFASFITQYSTGQVSVEIEWELQKENSKRWNPEVQYTSNYAKSANVDFTVDNNGLYTEPRPIGTRYLTRPL

SEQ ID NO: 773 - protein, 732 aa, Artificial Sequence
  source: /note="Description of Artificial Sequence: Synthetic polypeptide"
MAADGYLPDWLEDNLSEGIREWWDLKPGAPKPKANQQKQDDGRGLVLPGYKYLGPFNGLDKGEPVNAADAAALEHDKAYDQQLKAGDNPYLRYNHADAEFQERLQEDTSFGGNLGRAVFQAKKRVLEPFGLVEEGAKTAPGKKRPVEQSPQEPDSSSGIGKTGQQPAKKRLNFGQTGDSESVPDPQPLGEPPATPAAVGPTTMASGGGAPMADNNEGADGVGNASGNWHCDSTWLGDRVITTSTRTWALPTYNNHLYKQISSASTGASNDNHYFGYSTPWGYFDFNRFHCHFSPRDWQRLINNNWGFRPKRLNFKLFNIQVKEVTTNDGVTTIANNLTSTVQAFSDSEYQLPYVLGSAHQGCLPPFPADVFMIPQYGYLTLNNGSQAVGRSSFYCLEYFPSQMLRTGNNFTFSYTFEEVPFHSSYAHSQSLDRLMNPLIDPYLYYLNRTQNQSGSAQNKDLLFSRGSPAGMSVQPKNWLPGPCYRQQRVSKTKTDNNNSNFTWTGASKYNLNGRESIINPGTAMASHKDDEDKFFPMSGVMIFGKESAGASNTALDNVMITDEEEIKATNPVATERFGTVAVNFQSSSTDPATGDVHVMGALPGMVWQDRDVYLQGPIWAKIPHTDGHFHPSPLMGGFGLKHPPPQILIKNTPVPANPPAEFSATKFASFITQYSTGQVSVEIEWELQKENSKRWNPEVQYTSNYAKSANVDFTVDNNGLYTEPRPIGTRYL

SEQ ID NO: 774 - protein, 736 aa, Artificial Sequence
  source: /note="Description of Artificial Sequence: Synthetic polypeptide"
MAADGYLPDWLEDNLSEGIREWWDLKPGAPKPKANQQKQDDGRGLVLPGYKYLGPFNGLDKGEPVNAADAAALEHDKAYDQQLKAGDNPYLRYNHADAEFQERLQEDTSFGGNLGRAVFQAKKRVLEPFGLVEEGAKTAPGKKRPVEQSPQEPDSSSGIGKTGQQPAKKRLNFGQTGDSESVPDPQPLGEPPATPAAVGPTTMASGGGAPMADNNEGADGVGNASGNWHCDSTWLGDRVITTSTRTWALPTYNNHLYKQISSASTGASNDNHYFGYSTPWGYFDFNRFHCHFSPRDWQRLINNNWGFRPKRLNFKLFNIQVKEVTTNDGVTTIANNLTSTVQVFSDSEYQLPYVLGSAHQGCLPPFPADVFMIPQYGYLTLNNGSQAVGRSSFYCLEYFPSQMLRTGNNFTFSYTFEEVPFHSSYAHSQSLDRLMNPLIDQYLYYLNRTQNQSGSAQNKDLLFSRGSPAGMSVQPKNWLPGPCYRQQRVSKTKTDNNNSNFTWTGASKYNLNGRESIINPGTAMASHKDDEDKFFPMSGVMIFGKESAGASNTALDNVMITDEEEIKATNPVATERFGTVAVNFQSSSTDPATGDVHVMGALPGMVWQDRDVYLQGPIWAKIPHTDGHSHPSPLMGGFGLKHPPPQILIKNTPVPANPPAEFSATKFASFITQYSTGQVSVEIEWELQKENSKRWNPEVQYTSNYAKSANVDFTVDNNGLYTEPRPIGTRYLTRPL

SEQ ID NO: 775 - protein, 736 aa, Artificial Sequence
  source: /note="Description of Artificial Sequence: Synthetic polypeptide"
MAADGYLPDWLEDNLSEGIREWWDLKPGAPKPKANQQKQDDGRGLVLPGYKYLGPFNGLDKGEPVNAADAAALEHDKAYDQQLKAGDNPYLRYNHADAEFQERLQEDTSFGGNLGRAVFQAKKRVLEPFGLVEEGAKTAPGKKRPVEQSPQEPDSSSGIGKTGQQPAKKRLNFGQTGDSESVPDPQPLGEPPATPAAVGPTTMASGGGAPMADNNEGADGVGNASGNWHCDSTWLGDRVITTSTRTWALPTYNNHLYKQISSASTGASNDNHYFGYSTPWGYFDFNRFHCHFSPRDWQRLINNNWGFRPKRLNFKLFNIQVKEVTTNDGVTTIANNLTSTVQVFSDSEYQLPYVLGSAHQGCLPPFPADVFMIPQYGYLTLNNGSQAVGRSSFYCLEYFPSQMLRTGNNFTFSYTFEEVPFHSSYAHSQSLDRLMNPLIDLYLYYLNRTQNQSGSAQNKDLLFSRGSPAGMSVQPKNWLPGPCYRQQRVSKTKTDNNNSNFTWTGASKYNLNGRESIINPGTAMASHKDDEDKFFPMSGVMIFGKESAGTSNTALDNVMITDEEEIKATNPVATERFGTVAVNFQSSSTDPATGDVHVMGALPGMVWQDRDVYLQGPIWAKIPHTDGHFHPSPLMGGFGLKHPPPQILIKNTPVPANPPAEFSATKFASFITQYSTGQVSVEIEWELQKENSKRWNPEVQYTSNYAKSANVDFTVDNNGLYTEPRPIGTRYLTRPL

SEQ ID NO: 776 - protein, 736 aa, Artificial Sequence
  source: /note="Description of Artificial Sequence: Synthetic polypeptide"
MAADGYLPDWLEDSLSEGIREWWDLKPGAPKPKANQQKQDDGRGLVLPGYKYLGPFNGLDKGEPVNAADAAALEHDKAYDQQLKAGDNPYLRYNHADAEFQERLQEDTSFGGNLGRAVFQAKKRVLEPFGLVEEGAKTAPGKKRPVEQSPQEPDSSSGIGKTGQQPAKKRLNFGQTGDSESVPDPQPLGEPPATPAAVGPTTMASGGGAPMADNNEGADGVGNASGNWHCDSTWLGDRVITTSTRTWALPTYNNHLYKQISSASTGASNDNHYFGYSTPWGYFDFNRFHCHFSPRDWQRLINNNWGFRPKRLNFKLFNIQVKEVTTNDGVTTIANNLTSTVQVFSDSEYQLPYVLGSAHQGCLPPFPADVFMIPQYGYLTPNNGSQAVGRSSFYCLEYFPSQMLRTGNNFTFSYTFEEVPFHSSYAHSQSLDRLMNPLIDQYQYYLNRTQNQSGSAQNKDLLFSRGSPAGMSVQPKNWLPGPCYRQQRVSKTKTDNNNSNFTWTGASKYNLNGRESIINPGTAMASHKDDEDKFFPMSGVMIFGKESAGASNTALDNVMITDEEEIKATNPVATERFGTVAVNFQSSSTDPATGDVHVMGALPGMVWQDRDVYLQGPIWAKIPHTDGHFHPSPLMGGFGLKHPPPQILIKNTPVPANPPAEFSATKFASFITQYSTGQVSVEIEWELQKENSKRWNPEVQYTSNYAKSANVDFTVDNNGLYTEPRPIGTRYLTRPL

SEQ ID NO: 777 - protein, 736 aa, Artificial Sequence; identical to SEQ ID NO: 768
  source: /note="Description of Artificial Sequence: Synthetic polypeptide"

SEQ ID NO: 778 - protein, 735 aa, Artificial Sequence
  source: /note="Description of Artificial Sequence: Synthetic polypeptide"
MAADGYLPDWLEDTLSEGIRQWWKLKPGPPPPKPAERHKDDSRGLVLPGYKYLGPFNGLDKGEPVNEADAAALEHDKAYDRQLDSGDNPYLKYNHADAEFQERLKEDTSFGGNLGRAVFQAKKRVLEPLGLVEEPVKTAPGKKRPVEHSPVEPDSSSGTGKAGQQPARKRLNFGQTGDADSVPDPQPLGQPPAAPSGLGTNTMATGSGAPMADNNEGADGVGNSSGNWHCDSTWMGDRVITTSTRTWALPTYNNHLYKQISSQSGASNDNHYFGYSTPWGYFDFNRFHCHFSPRDWQRLINNNWGFRPKRLNFKLFNIQVKEVTQNDGTTTIANNLTSTVQVFTDSEYQLPYVLGSAHQGCLPPFPADVFMVPQYGYLTLNNGSQAVGRSSFYCLEYFPSQMLRTGNNFTFSYTFEDVPFHSSYAHSQSLDRLMNPLIDQYLYYLSRTNTPSGTTTQSRLQFSRAGASDIRDQSRNWLPGPCYRQQRVSKTSADNNNSEYSWTGATKYHLNGRDSLVNPGPAMASHKDDEEKFFPQSGVLIFGKQGSEKTNVDIEKVMITDEEEIRTTNPVATEQYGSVSTNLQRGNRQAATADVNTQGVLPGMVWQDRDVYLQGPIWAKIPHTDGHFHPSPLMGGFGLKHPPPQILIKNTPVPANPSTTFSAAKFASFITQYSTGQVSVEIEWELQKENSKRWNPEIQYTSNYNKSVNVDFTVDTNGVYSEPRPIGTRYLTRNL

SEQ ID NO: 779 - DNA, 2211 bp, Artificial Sequence
  source: /note="Description of Artificial Sequence: Synthetic polynucleotide"
atggctgctgacggttatcttccagattggctcgaggacaacctttctgaaggcattcgtgagtggtgggctctgaaacctggagtccctcaacccaaagcgaaccaacaacaccaggacaaccgtcggggtcttgtgcttccgggttacaaatacctcggacccggtaacggactcgacaaaggagagccggtcaacgaggcggacgcggcagccctcgaacacgacaaagcttacgaccagcagctcaaggccggtgacaacccgtacctcaagtacaaccacgccgacgccgagtttcaggagcgtcttcaagaagatacgtcttttgggggcaaccttggcagagcagtcttccaggccaaaaagaggatccttgagcctcttggtctggttgaggaagcagctaaaacggctcctggaaagaagaggcctgtagatcagtctcctcaggaaccggactcatcatctggtgttggcaaatcgggcaaacagcctgccagaaaaagactaaatttcggtcagactggcgactcagagtcagtcccagaccctcaacctctcggagaaccaccagcagcccccacaagtttgggatctaatacaatggcttcaggcggtggcgcaccaatggcagacaataacgagggtgccgatggagtgggtaattcctcaggaaattggcattgcgattcccaatggctgggcgacagagtcatcaccaccagcaccagaacctgggccctgcccacttacaacaaccatctctacaagcaaatctccagccaatcaggagcttcaaacgacaaccactactttggctacagcaccccttgggggtattttgactttaacagattccactgccacttctcaccacgtgactggcagcgactcattaacaacaactggggattccggcccaagaaactcagcttcaagctcttcaacatccaagttaaagaggtcacgcagaacgatggcacgacgactattgccaataaccttaccagcacggttcaagtgtttacggactcggagtatcagctcccgtacgtgctcgggtcggcgcaccaaggctgcctcccgccgtttccagcggacgtcttcatggtccctcagtatggatacctcaccctgaacaacggaagtcaagcggtgggacgctcatccttttactgcccggagtacttcccttcgcagatgctaaggactggaaataacttccaattcagctataccttcgaggatgtaccttttcacagcagctacgctcacagccagagtttggatcgcttgatgaatcctcttattgatcagtatctgtactacctgaacagaacgcaaggaacaacctctggaacaaccaaccaatcacggctgctttttagccaggctgggcctcagtctatgtctttgcaggccagaaattggctacctgggccctgctaccggcaacagagactttcaaagactgctaacgacaacaacaacagtaactttccttggacagcggccagcaaatatcatctcaatggccgcgactcgctggtgaatccaggaccagctatggccagtcacaaggacgatgaagaaaaatttttccctatgcacggcaatctaatatttggcaaagaagggacaacggcaagtaacgcagaattagataatgtaatgattacggatgaagaagagattcgtaccaccaatcctgtggcaacagagcagtatggaactgtggcaaataacttgcagagctcaaatacagctcccacgactagaactgtcaatgatcagggggccttacctggcatggtgtggcaagatcgtgacgtgtaccttcaaggacctatctgggcaaagattcctcacacggatggacactttcatccttctcctctgatgggaggctttggactgaaacatccgcctcctcaaatcatgatcaaaaatactccggtaccggcaaatcctccgacgactttcagcccggccaagtttgcttcatttatcactcagtactccactggacaggtcagcgtggaaattgagtgggagctacagaaagaaaacagcaaacgttggaatccagagattcagtacacttccaactacaacaagtctgttaatgtggactttactgtagacactaatggtgtttatagtgaacctcaccctattggaacccggtatctcacacgaaacttgtaa

SEQ ID NO: 780 - DNA, 2211 bp, Artificial Sequence
  source: /note="Description of Artificial Sequence: Synthetic polynucleotide"
atggctgctgatggttatcttccagattggctcgaggacaacctttctgaaggcattcgtgagtggtgggctctgaaacctggagtccctcaacccaaagcgaaccaacaacaccaggacaaccgtcggggtcttgtgcttccgggttacaaatacctcggacccggtaacggactcgacaaaggagagccggtcaacgaggcggacgcggcagccctcgaacacgacaaagcttacgaccagcagctcaaggccggtgacaacccgtacctcaagtacaaccacgccgacgccgagtttcaggagcgtcttcaagaagatacgtcttttgggggcaaccttggcagagcagtcttccaggccaaaaagaggatccttgagcctcttggtctggttgaggaagcagctaaaacggctcctggaaagaagaggcctgtagatcagtctcctcaggaaccggactcatcatctggtgttggcaaatcgggcaaacagcctgccagaaaaagactaaatttcggtcagactggcgactcagagtcagtcccagaccctcaacctctcggagaaccaccagcagcccccacaagtttgggatctaatacaatggcttcaggcggtggcgcaccaatggcagacaataacgagggtgccgatggagtgggtaattcctcaggaaattggcattgcgattcccaatggctgggcgacagagtcatcaccaccagcaccagaacctgggccctgcccacttacaacaaccatctctacaagcaaatctccagccaatcaggagcttcaaacgacaaccactactttggctacagcaccccttgggggtattttgactttaacagattccactgccacttctcaccacgtgactggcagcgactcattaacaacaactggggattccggcccaagaaactcagcttcaagctcttcaacatccaagttaaagaggtcacgcagaacgatggcacgacgactgttgccaataaccttaccagcacggttcaagtgtttacggactcggagtatcaactcccgtacgtgctcgggtcggcgcaccaaggctgtctcccgccgtttccagcggacgtcttcatggtccctcagtatggatacctcaccctgaacaacggaagtcaagcggtgggacgctcatccttttactgcctggagtacttcccttcgcagatgctaaggactggaaataacttccaattcagctataccttcgaggatgtaccttttcacagcagctacgctcacagccagagtttggatcgcttgatgaatcctcttattgatcagtatctgtactacctgaacagaacgcaaggaacaacctctggaacaaccaaccaatcacggctgctttttagccaggctgggcctcagtctatgtctttgcaggccagaaattggctacctgggccctgctaccggcaacagagactttcaaagactgctaacgacaacaacaacagtaactttccttggacagcggccagcaaatatcatctcaatggccgcgactcgctggtgaatccaggaccagctatggccagtcacaaggacgatgaagaaaaatttttccctatgcacggcaatctaatatttggcaaagaagggacaacggcaagtaacgcagaattagataatgtaatgattacggatgaagaagagattcgtaccaccaatcctgtggcaacagagcagtatggaactgtggcaaataacttgcagagctcaaatacagctcccacgactagaactgtcaatgatcagggggccttacctggcatggtgtggcaagatcgtgacgtgtaccttcaaggacctatctgggcaaagattcctcacacggatggacactttcatccttctcctctgatgggaggctttggactgaaacatccgcctcctcaaatcatgatcaaaaatactccggtaccggcaaatcctccgacgactttcagcccggccaagtttgcttcatttatcactcagtactccactggacaggtcagcgtggaaattgagtgggagctacagaaagaaaacagcaaacgttggaatccagagattcagtacacttccaactacaacaagtctgttaatgtggactttactgtagacactaatggtgtttatagtgaacctcgccctattggaacccggtatctcacacgaaacttgtaa

SEQ ID NO: 781 - DNA, 2211 bp, Artificial Sequence
  source: /note="Description of Artificial Sequence: Synthetic polynucleotide"
atggctgctgacggttatcttccagattggctcgaggacaacctttctgaaggcattcgtgagtggtgggctctgaaacctggagtccctcaacccaaagcgaaccaacaacaccaggacaaccgtcggggtcttgtgcttccgggttacaaatacctcggacccggtaacggactcgacaaaggagagccggtcaacgaggcggacgcggcagccctcgaacacgacaaagcttacgaccagcagctcaaggccggtgacaacccgtacctcaagtacaaccacgccgacgccgagtttcaggagcgtcttcaagaagatacgtcttttgggggcaaccttggcagagcagtcttccaggccaaaaagaggatccttgagcctcttggtctggttgaggaagcagctaaaacggctcctggaaagaagaggcctgtagatcagtctcctcaggaaccggactcatcatctggtgttggcaaatcgggcaaacagcctgccagaaaaagactaaatttcggtcagactggcgactcagagtcagtcccagaccctcaacctctcggagaaccaccagcagcccccacaagtttgggatctaatacaatggcttcaggcggtggcgcaccaatggcagacaataacgagggtgccgatggagtgggtaattcctcaggaaattggcattgcgattcccaatggctgggcgacagagtcatcaccaccagcaccagaacctgggccctgcccacttacaacaaccatctctacaagcaaatctccggccaatcaggagcttcaaacgacaaccactactttggctacagcaccccttgggggtattttgactttaacagattccactgccacttctcaccacgtgactggcagcgactcattaacaacaactggggattccggcccaagaaactcagcttcaagctcttcaacatccaagttaaagaggtcacgcagaacgatggcacgacgactattgccaataaccttaccagcacggttcaagtgtttacggactcggagtatcagctcccgtacgtgctcgggtcggcgcaccaaggctgtctcccgccgtttccagcggacgtcttcatggtccctcagtatggatacctcaccctgaacaacggaagtcaagcggtgggacgctcatccttttactgcctggagtacttcccttcgcagatgctaaggactggaaataacttccaattcagctataccttcgaggatgtaccttttcacagcagctacgctcacagccagagtttggatcgcttgatgaatcctcttattgatcagtatctgtactacctgaacagaacgcaaggaacaacctctggaacaaccaaccaatcacggctgctttttagccaggctgggcctcagtctatgtctttgcaggccagaaattggctacctgggccctgctaccggcaacagagactttcaaagactgctaacggcaacaacaacagtaactttccttggacagcggccagcaaatatcatctcaatggccgcgactcgctggtgaatccaggaccagctatggccagtcacaaggacgatgaagaaaaatttttccctatgcacggcaatctaatatttggcaaagaagggacaacggcaagtaacgcagaattagataatgtaatgattacggatgaagaagagattcgtaccaccaatcctgtggcaacagagcagtgtggaactgtggcaaataacttgcagagctcaaatacagctcccacgactagaactgtcaatgatcagggggccttacctggcatggtgtggcaagatcgtgacgtgtaccttcaaggacctatctgggcaaagattcctcacacggatggacactttcatccttctcctctgatgggaggctttggactgaaacatccgcctcctcaaatcatgatcaaaaatactccggtaccggcaaatcctccgacgactttcagcccggccaagtttgcttcatttatcactcagtactccactggacaggtcagcgtggaaattgagtgggagctacagaaagaaaacagcaaacgttggaatccagagattcagtacacttccaactacaacaagtctgttaatgtggactttactgtagacactaatggtgtttatagtgaacctcgccctattggaacccggtatctcacacgaaacttgtaa

SEQ ID NO: 782 - DNA, 2212 bp, Artificial Sequence
  source: /note="Description of Artificial Sequence: Synthetic polynucleotide"
  modified_base (1283)..(1283): a, c, t, or g
atggctgctgacggttatcttccagattggctcgaggacaacctttctgaaggcattcgtgagtggtgggctctgaaacctggagtccctcaacccaaagcgaaccaacaacaccaggacaaccgtcggggtcttgtgcttccgggttacaaatacctcggaccgggtaacggactcgacaaaggagagccggtcaacgaggcggacgcggcagccctcgaacacgacaaagcttacgaccagcagctcaaggccggtgacaacccgtacctcaagtacaaccacgccgacgccgagtttcaggagcgtcttcaagaagatacgtcttttgggggcaaccttggcagagcagtcttccaggccaaaaagaggatccttgagcctcttggtctggttgagggagcagctaaaacggctcctggaaagaagaggcctgtagatcagtctcctcaggaaccggactcatcatctggtgttggcaaatcgggcaaacagcctgccagaaaaagactaaatttcggtcagactggcgactcagagtcagtcccagaccctcaacctctcggagaaccaccagcagcccccacaagtttgggatctaatacaatggcttcaggcggtggcgcaccaatggcagacaataacgagggtgccgatggagtgggtaattcctcaggaaattggcattgcgattcccaatggctgggcgacagagtcatcaccaccagcaccagaacctgggccctgcccacttacaacagccatctctacaagcaaatctccagccaatcaggagcttcaaacgacaaccactactttggctacagcaccccttgggggtattttgactttaacagattccactgccacttctcaccacgtgactggcagcgactcattaacaacaactggggattccggcccaagaaactcagcttcaagctcttcaacatccaagttaaagaggtcacgcagaacgatggcacgacgactattgccaataaccttaccagcacggtccaagtgtttacggactcggagtatcagctcccgtacgtgctcgggtcggcgcaccaaggctgtctcccgccgtttccagcggacgccttcatggtccctcagtatggatacctcaccctgaacaacggaagtcaagcggtgggacgctcatccttttactgcctggagtacttcccttcgcagatgctaaggactggaaataacttccaattcagctataccttcgaggatgtaccttttcacggcagctacgctcacagccngagtttggatcgcttgatgaatcctcttattgatcagtatctgtactacctgaacagaacgcaaggaacaacctctggaacaaccaaccaatcacggctgctttttagccaggctgggcctcagtctatgtctttgcaggccagaaattggctacctgggccctgctaccggcaacagagacttttcaaagactgctaacgacaacaacaacagtaactttccttggacagcggccagcaaatatcatctcaatggccgcgactcgctggtgaatccaggaccagctatggccagtcacaaggacgatgaagaaaaatttttccctatgcacggcaatctaatatttggcaaagaagggacaacggcaagtaacgcagaattagataatgtaatgattacggatgaagaagagattcgtaccaccaatcctgtggcaacagagcagtatggaactgtggcaaataacttgcagagctcaaatacagctcccacgactagaactgtcaatgatcagggggccttacctggcatggtgtggcaagatcgtgacgtgtaccttcaaggacctatctgggcaaagattcctcacacggatggacactttcatccttctcctctgatgggaggctttggactgaaacatccgcctcctcaaatcatgatcaaaaatactccggtaccggcaaatcctccgacgactttcagcccggccaagtttgcttcatttatcactcagtactccactggacaggtcagcgtggaaattgagtgggagctacagaaagaaaacagcaaacgttggaatccagagattcagtacacttccaactacaacaagtctgttaatgtggactttactgtagacactaatggtgtttatagtgaacctcgccctattggaacccggtatctcacacgaaactcgtaa

SEQ ID NO: 783 - DNA, 2212 bp, Artificial Sequence
  source: /note="Description of Artificial Sequence: Synthetic polynucleotide"
atggctgctgacggttatcttccagattggctcgaggacaacctttctgaaggcattcgtgagtggtgggctctgaaacctggagtccctcaacccaaagcgaaccaacaacaccaggacaaccgtcggggtcttgtgcttccgggttacaaatacctcggacccggtaacggactcgacaaaggagagccggtcaacgaggcggacgcggcagccctcgaacacgacaaagcttacgaccagcagctcaaggccggtgacaacccgtacctcaagtacaaccacgccgacgccgagtttcaggagcgtcttcaagaagatacgtcttttgggggcaaccttggcagagcagtcttccaggccaaaaagaggatccttgagcctcttggtctggttgagggagcagctaaaacggctcctggaaagaagaggcctgtagatcagtctcctcaggaaccggactcatcatctggtgttggcaaatcgggcaaacagcttgccagaaaaagactaaatttcggtcagactggcgactcagagtcagtcccagaccctcaacctctcggagaaccaccagcagcccccacaagtttgggatctaatacaatggcttcaggcggtggcgcaccaatggcagacaataacgagggtgccgatggagtgggtaattcctcaggaaattggcattgcgattcccaatggctgggcgacagagtcatcaccaccagcaccagaacctgggccctgcccacttacaacagccatctctacaagcaaatctccggccaatcaggagcttcaaacgacaaccactactttggctacagcaccccctgggggtattttgactttaacagattccactgccacttctcaccacgtgactggcagcgactcattaacaacaactggggattccggcccaagaaactcagcttcaagctcttcaacatccaagttaaagaggtcacgcagaacgatggcacgacgactattgccaataaccttaccagcacggttcaagtgtttacggactcggagtatcagctcccgtacgtgctcgggtcggcgcaccaaggctgtctcccgccgtttccagcggacgtcttcatggtccctcagtatggatacctcaccctgaacaacggaagtcaagcggtgggacgctcatccttttactgcctggagtacttcccttcgcagatgctaaggactggaaataacttccaattcagctataccttcgaggatgtaccttttcacagcagctacgctcacagccagagtttggatcgcttgatgaatcctcttattgatcagtatctgtactacctgaacagaacgcaaggaacaacctctggaacaaccaaccaatcacggctgctttttagccaggctgggcctcagtctatgtctttgcaggccagaaattggctacctgggccctgctaccggcaacagagactttcaaagactgctaacgacaacaacaacagtaactttccttggacagcggccagcaaatatcatctcaatggccgcgactcgctggtgaatcccaggaccagctatggccagtcacaaggacgatgaagaaaaatttttccctatgcacggcaatctaatatttggcaaagaagggacaacggcaagtaacgcagaattagataatgtaatgattacggatgaagaagagattcgtaccaccaatcctgtggcaacagagcagtatggaactgtggcaaataacttgcagagctcaaatacagctcccacgactagaactgtcaatgatcagggggccttacctggcatggtgtggcaagatcgtgacgtgtaccttcaaggacctatctgggcaaagattcctcacacggatggacactttcatccttctcctctgatgggaggctttggactgaaacatccgcctcctcaaatcatgatcaaaaatactccggtaccggcaaatcctccgacgactttcagcccggccaagtttgcttcatttatcactcagtactccactggacaggtcagcgtggaaattgagtgggagctacagaaagaaaacagcaaacgttggaatccagagattcagtacacttccaactacaacaagtctgttaatgtggactttactgtagacactaatggtgtttatagtgaacctcgccctattggaacccggtatctcacacgaaacttgtaa

SEQ ID NO: 784 - DNA, 2212 bp, Artificial Sequence
  source: /note="Description of Artificial Sequence: Synthetic polynucleotide"
atggctgctgacggttatcttccagattggctcgaggacaacctttctgaaggcattcgtgagtggtgggctctgaaacctggagtccctcaacccaaagcgaaccaacaacaccaggacgaccgtcggggtcttgtgcttccgggttacaaatacctcggacccggtaacggactcgacaaaggagagccggtcaacgaggcggacgcggcagccctcgaacacgacaaagcttacgaccagcagctcaaggccggtgacaacccgtgcctcaagtacaaccacgccgacgccgagtttcaggagcgtcttcaagaagatacgtcttttgggggcaaccttggcagagcagtcttccaggccaaaaagaggatccttgagcctcttggtctggttgaggaagcagctaaaacggctcctggaaagaagaggcctgtagatcagtctcctcaggaaccggactcatcatctggtgttggcaaatcgggcaaacagcctgccagaaaaagactaaatttcggtcagactggcgactcagagtcagtcccagaccctcaacctctcggagaaccaccagcagcccccacaagtttgggatctaatacaatggcttcaggcggtagcgcaccaatggcagacaataacgagggtgccgatggagtgggtaattcctcaggaaattggcattgcgattcccaatggctgggcgacagagtcatcaccaccagcaccagaacctgggccctgcccacttacaacaaccatctctacaagcaaatctccagccaatcaggagcttcaaacgacaaccactactttggctacagcaccccttgggggtattttgactttaacagattccactgccacttctcaccacgtgactggcagcgactcattaacaacaactggggattccggcccaagaaactcagcttcaagctcttcaacatccaagttaaagaggtcacgcagaacgatggcacgacgactattgccaataaccttaccagcacggttcaagtgtttacggactcggagtatcagctcccgtacgtgctcgggtcggcgcaccaaggctgtctcccgccgtttccagcggacgtcttcatggtccctcagtatggatacctcaccctgaacaacggaagtcaagcggtgggacgctcatccttttactgcctggagtacttcccttcgcagatgctaaggactggaaataacttccaattcagctataccttcgaggatgtaccttttcacagcagctacgctcacagccagagtttggatcgcttgatggatcctcttattgatcagtatctgtactacctgaacagaacgcaaggaacaacctctggaacaaccaaccaatcacggctgctttttagccaggctgggcctcagtctatgtctttgcaggccagaaattggctacctgggccctgctaccggcaacagagactttcaaagactgctaacgacaacaacaacagtaactttccttggacagcggccagcaaatatcatctcaatggccgcgactcgctggtgaatccaggaccagctatggccagtcacaaaggacgatgaagaaaaatttttccctatgcacggcaatctaatatttggcaaagaagggacaacggcaagtaacgcagaattagataatgtaatgattacggatgaagaagagattcgtaccaccaatcctgtggcaacagagcagtatggaactgtggcaaataacttgcagagctcaaatacagctcccacgactagaactgtcaatgatcagggggccttacctggcatggtgtggcaagatcgtgacgtgtaccttcaaggacctatctgggcaaagattcctcacacggatggacactttcatccttctcctctgatgggaggctttggactgaaacatccgcctcctcaaatcatgatcaaaaatactccggtaccggcaaatcctccgacgactttcagcccggccaagtttgcttcatttatcactcagtactccactggacaggtcagcgtggaaattgagtgggagctacagaaagaaaacagcaaacgttggaatccagagattcagtacacttccaactacaacaagtctgttaatgtggactttactgtagacactaatggtgtttatagtgaacctcgccctattggaacccggtatctcacacgaaacctgtaa

SEQ ID NO: 785 - DNA, 2211 bp, Artificial Sequence
  source: /note="Description of Artificial Sequence: Synthetic polynucleotide"
atggctgctgacggttatcttccagattggctcgaggacaacctttctgaaggcattcgtgagtggtgggctctgaaacctggagtccctcaacccaaagcgaaccaacaacaccaggacgaccgtcggggtcttgtgcttccgggttacaaatacctcggacccggtaacggactcgacaaaggagagccggtcaacgaggcggacgcggcagccctcgaacacgacaaagcttacgaccagcagctcaaggccggtgacaacccgtacctcaagtacaaccacgccgacgccgagtttcaggagcgtcttcaagaagatacgtcttttgggggcaaccttggcagagcagtcttccaggccaaaaagaggatccttgagcctcttggtctggttgaggaagcagctaaaacggctcctggaaagaagaggcctgtagatcagtctcctcaggaaccggactcatcatctggtgttggcaaatcgggcaaacagcctgccagaaaaagactaaatttcggtcagactggcgactcagagtcagtcccagaccctcaacctctcggagaaccaccagcagcccccacaagtttgggatctaatacaatggcttcaggcggtggcgcaccaatggcagacaataacgagggtgccgatggagtgggtaattcctcaggaaattggcattgcgattcccaatggctgggcaacagagtcatcaccaccagcaccagaacctgggccctgcccacttacaacaaccatctctacaagcaaatctccagccaatcaggagcttcaaacgacaaccactactttggctacagcaccccttgggggtattttgactttaacagattccactgccacttctcaccacgtgactggcagcgactcattaacaacaactggggattccggcccaagaaactcagcttcaagctcttcaacatccaagttaaagaggtcacgcagaacgatggcacgacgactattgccaataaccttaccagcacggttcaagtgtttacggactcggagtatcagctcccgtacgtgctcgggtcggcgcaccaaggctgtctcccgccgtttccagcggacgtcttcatggtccctcagtatggatacctcaccctgaacaacggaagtcaagcggtgggacgctcatccttttactgcctggagtacttcccttcgcagatgctaaggactggaaataacttccaattcagctataccttcgaggatgtaccttttcacagcagctacgctcacagccagagtttggatcgcttgatgaatcctcttattgatcagtatctgtactacctgaacagaacgcaaggaacaacctctggaacaaccaaccaatcacggctgctttttagccaggctgggcctcagtctatgtctttgcaggccagaaattggctacctgggccctgctaccggcaacagagactttcaaagactgctaacgacaacaacaacagtaactttccttggacagcggccagcaaatatcatctcaatggccgcgactcgctggtgaatccaggaccagctatggccagtcacaaggacgatgaagaaaaatttttccctatgcacggcaatctaatatttggcaaagaagggacaacggcaagtaacgcagaattagataatgtaatgattacggatgaagaagagattcgtaccaccaatcctgtggcaacagagcagtatggaactgtggcaaataacttgcagagctcaaatacagctcccacgactagaactgtcaatgatcagggggccttacctggcatggtgtggcaagatcgtgacgtgtaccttcaaggacctatctgggcaaagattcctcacacggatggacactttcatccttctcctctgatgggaggctttggactgaaacatccgcctcctcaaatcatgatcaaaaatactccggtaccggcaaatcctccgacgactttcagcccggccaagtttgcttcatttatcactcagtactccactggacaggtcagcgtggaaattgagtgggagctacagaaagaaaacagcaaacgttggaatccagagattcagtacacttccaactacaacaagtctgttaatgtggactttactgtagacactaatggtgtttatagtgaacctcgccctattggaacccggtatctcacacgaaacttgtaa

SEQ ID NO: 786 - DNA, 2211 bp, Artificial Sequence
  source: /note="Description of Artificial Sequence: Synthetic polynucleotide"
atggctgctgacggttatcttccagattggctcgaggacaacctttctgaaggcattcgtgagtggtgggctctgaaacctggagtccctcaacccaaagcgaaccaacaacaccaggacgaccgtcggggtcttgtgcttccgggttacaaatacctcggacccggtaacggactcgacaaaggagagccggtcaacgaggcggacgcggcagccctcgaacacgacaaagcttacgaccagcagctcaaggccggtgacaacccgtacctcaagtacaaccacgccgacgccgagtttcaggagcgtcttcaagaagatacgtcttttgggggcaaccttggcagagcagtcttccaggccaaaaagaggatccttgagcctcttggtctggttgaggaagcagctaaaacggctcctggaaagaagaggcctgtagatcagtctcctcaggaaccggactcatcatctggtgttggcaaatcgggcaaacagcctgccagaaaaagactaaatttcggtcagactggcgactcagagtcagtcccagaccctcaacctctcggagaaccaccagcagcccccacaagtttgggatctaatacaatggcttcaggcggtggcgcaccaatggcggacaataacgagggtgccgatggagtgggtaattcctcaggaaattggcattgcgattcccaatggctgggcgacagagtcatcaccaccagcaccagaacctgggccctgcccacttacaacaaccatctctacaagcaaatctccagccaatcaggagcttcaaacgacaaccactactttggctacagcaccccttgggggtattttgactttaacagattccactgccacttctcaccacgtgactggcagcgactcattaacaacaactggggattccggcccaagaaactcagcttcaagctcttcaacatccaagttaaagaggtcacgcagaacgatggcacgacgactattgccaataaccttaccagcacggttcaagtgtttacggactcggagtatcagctcccgtacgtgctcgggtcggcgcaccaaggctgtctcccgccgtttccagcggacgtcttcatggtccctcagtatggatacctcaccctgaacaacggaagtcaagcggtgggacgctcatccttttactgcctggagtacttcccttcgcagatgctaaggactggaaataacttccaattcagctataccttcgaggatgtaccttttcacagcagctacgctcacagccagagtttggatcgcttgatgaatcctcttattgatcagtatctgtactacctgaacagaacgcaaggaacaacctctggaacaaccaaccaatcacggctgctttttagccaggctgggcctcagtctatgtctttgcaggccagaaattggctacctgggccctgctaccggcaacagagactttcaaagactgctaacgacaacaacaacagtaactttccttggacagcggccagcaaatatcatctcaatggccgcgactcgctggtgaatccaggaccagctatggccagtcacaaggacgatgaagaaaaatttttccctatgcacggcaatctaatatttggcaaagaagggacaacggcaagtaacgcagaattagataatgtaatgattacggatgaagaagagattcgtaccaccaatcctgtggcaacagtgcagtatggaactgtggcaaataacttgcagagctcaaatacagctcccacgactagaactgtcaatgatcagggggccttacctggcatggtgtggcaagatcgtgacgtgtaccttcaaggacctatctgggcaaagattcctcacacggatggacactttcatccttctcctctgatgggaggctttggactgaaacatccgcctcctcaaatcatgatcaaaaatactccggtaccggcaaatcctccgacgactttcagcccggccaagtttgcttcatttatcactcagtactccactggacaggtcagcgtggaaattgagtgggagctacagaaagaaaacagcaaacgttggaatccagagattcagtacacttccaactacaacaagtctgttaatgtggactttactgtagacactaatggtgtttatagtgaacctcgccctattggaacccggtatctcacacgaaacttgtaa

SEQ ID NO: 787 - DNA, 2211 bp, Artificial Sequence
  source: /note="Description of Artificial Sequence: Synthetic polynucleotide"
atggctgctgacggttatcttccagattggctcgaggacaacctttctgaaggcattcgtgagtggtgggctctgaaacctggagtccctcaacccaaagcgaaccaacaacaccaggacaaccgtcggggtcttgtgcttccgggttacaaatacctcggacccggtaacggactcgacaaaggagagccggtcaacgaggcggacgcggcagccctcgaacacgacaaagcttacgaccagcagctcaaggccggtgacaacccgtacctcaagtacaaccacgccgacgccgagtttcaggagcgtcttcaagaagatacgtcttttgggggcaaccttggcagagcagtcttccaggccaaaaaggggatccttgagcctcttggtctggttgaggaagcagctaaaacggctcctggaaagaagaggcctgtagatcagtctcctcaggaaccggactcatcatctggtgttggcaaatcgggcaaacagcctgccagaaaaagactaaatttcggtcagactggcgactcagagtcagtcccagaccctcaacctctcggagaaccaccagcagcccccacaagtttgggatctaatacaatggcttcaggcggtggcgcaccaatggcagacaataacgagggtgccgatggagtgggtaattcctcaggaaattggcattgcgattcccaatggctgggcgacagagtcatcaccaccagcaccagaacctgggccctgcccacttacaacaaccatctctacaagcaaatctccagccaatcaggagcttcaaacgacaaccactactttggctacagcaccccttgggggtattttgactttaacagattccactgccacttctcaccacgtgactggcagcgactcattaacaacaactggggattccggcccaagaaactcagcttcaagctcttcaacatccaagttaaagaggtcacgcagaacgatggcacgacgactattgccaataaccttaccagcacggttcaagtgtttacggactcggagtatcagctcccgtacgtgttcgggtcggcgcaccaaggctgtctcccgccgtttccagcggacgtcttcatggtccctcagtatggatacctcaccctgaacaacggaagtcaagcggtgggacgctcatccttttactgcctggagtacttcccttcgcagatgctaaggactggaaataacttccaattcagctataccttcgaggatgtaccttttcacagcagctacgctcacagccagagttcggatcgcttgatgaatcctcttattgatcagtatctgtactacctgaacagaacgcaaggaacaacctctggaacaaccaaccaatcacggctgctttttagccaggctgggcctcagtctatgtctttgcaggccagaaattggctacctgggccctgctaccggcaacagagactttcaaagactgctaacgacaacaacaacagtaactttccttgaacagcggccagcaaatatcatctcaatggccgcgactcgctggtgaatccaggaccagctatggccagtcacaaggacgatgaagaaaaatttttccctatgcacggcaatctaatatttggcaaagaagggacaacggcaagtaacgcagaattagataatgtaatgattacggatgaagaagagattcgtaccaccaatcctgtggcaacagagcagtatggaactgtggcaaataacttgcagagctcaaatacagctcccacgactagaactgtcaatgatcagggggccttacctggcatggtgtggcaagatcgtgacgtgtaccttcaaggacctatctgggcaaagattcctcacacggatggacactttcatccttctcctctgatgggaggctttggactgaaacatccgcctcctcaaatcatgatcaaaaatactccggtaccggcaaatcctccgacgactttcagcccggccaagtttgcttcatttatcactcagtactccactggacaggtcagcgtggaaattgagtgggagctacagaaagaaaacagcaaacgttggaatccagagattcagtacacttccaactacaacaagtctgttaatgtggactttactgtagacactaatggtgtttatagtgaacctcgccctattggaacccggtatctcacacgaaacttgtaa

SEQ ID NO: 788 - DNA, 2211 bp, Artificial Sequence
  source: /note="Description of Artificial Sequence: Synthetic polynucleotide"
atggctgctgacggttatcttccagattggctcgaggacaacctttctgaaggcattcgtgagtggtgggctctgaaacctggagtccctcaacccaaagcgaaccaacaacaccaggacaaccgtcggggtcttgtgcttccgggttacaaatacctcggacccggtaacggactcgacgaaggagagccggtcaacgaggcggacgcggcagccctcgaacacgacaaagcttacgaccagcagctcaaggccggtgacaacccgtacctcaagtacaaccacgccgacgccgagtttcaggagcgtcttcaagaagatacgtcttttgggggcaaccttggcagagcagtcttccaggccaaaaagaggatccttgagcctcttggtctggttgagggagcagctaaaacggctcctggaaagaagaggcctgtagatcagtctcctcaggaaccggactcatcatctggtgttggcaaatcgggcaaacagcctgccagaaaaagactaaatttcggtcagactggcgactcagagtcagtcccagaccctcaacctctcggagaaccaccagcagcccccacaagtttgggatctaatacaatggcttcaggcggtggcgcaccaatggcagacaataacgagggtgccgatggagtgggtaattcctcaggaaattggcattgcgattcccaatggctgggcgacagagtcatcaccaccagcaccagaacctgggccctgcccacttacaacagccacctctacaagcaaatctccagccaatcaggagcttcaaacgacaaccactactttggctacagcaccccttgggggtattttgactttaacagattccactgccacttctcaccacgtgactggcagcgactcattaacaacaactggggattccggcccaagaaactcagcttcaagctcttcaacatccaagttaaagaggtcacgcagaacgatggcacgacgactattgccaataaccttaccagcacggttcaagtgtttacggactcggagtatcagctcccgtacgtgctcgggtcggcgcaccaaggctgtctcccgccgtttccagcggacgtcttcatggtccctcagtatggatacctcaccctgaacaacggaagtcaagcggtgggacgctcatccttttactgcctggagtacttcccttcgcagatgctaaggactggaaataacttccaattcagctataccttcgaggatgtaccttttcacagcagctacgctcacagccagagtttggatcgcttgatgaatcctcttattgatcagtatctgtactacctgaacagaacgcaaggaacaacctctggaacaaccaaccaatcacggctgctttttagccaggctgggcctcagtctatgtctttgcaggccagaaattggctacctgggccctgctaccggcaacagagactttcaaagactgctaacgacaacaacaacagtaactttccttggacagcggccagcaaatatcatctcaatggccgcgactcgctggtgaatccaggaccagctatggccagtcacaaggacgatgaagaaaaatttttccctatgcacggcaatctaatatttggcaaagaagggacaacggcaagtaacgcagaattagataatgtaatgattacggatgaagaagagattcgtaccaccaatcctgtggcaacagagcagtatggaactgtggcaaataacttgcagagctcaaatacagctcccacgactagaactgtcaatgatcagggggccttacctggcatggtgtggcaagatcgtgacgtgtaccttcaaggacctatctgggcaaagattcctcacacggatggacactttcatccttctcctctgatgggaggctttggactgaaacatccgcctcctcaaatcatgatcaaaaatactccggtaccggcaaatcctccgacgactttcagcccggccaagtttgcttcatttatcactcagtactccactggacaggtcagcgtggaaattgagtgggagctacagaaagaaaacagcaaacgttggaatccagagattcagtacacttccaactacaacaagtctgttaatgtggactttactgtagacactaatggtgtttatagtgaacctcgccctattggaacccggtatctcacacgaaacttgtaa

SEQ ID NO: 789 - DNA, 2211 bp, Artificial Sequence
  source: /note="Description of Artificial Sequence: Synthetic polynucleotide"
atggctgctgacggttatcttccagattggctcgaggacaacctttctgaaggcattcgtgagtggtgggctctgaaacctggagtccctcaacccaaagcgaaccaacaacaccaggacaaccgtcggggtcttgtgcttccgggttacaaatacctcggacccggtaacggactcgacaaaggagagccggtcaacgaggcggacgcggcagccctcgaacacgacaaagcttacgaccagcagctcaaggccggtgacaacccgtacctcaagtacaaccacgccgacgccgagtttcaggagcgtcttcaagaagatacgtcttttgggggcaaccttggcagagcagtcttccaggccaaaaagaggatccttgagcctcttggtctggttgagggagcagctaaaacggctcctggaaagaagaggcctgtagatcagtctcctcaggaaccggactcatcatctggtgttggcaaatcgggcaaacagcctgccagaaaaagactaaatttcggtcagactggcgactcagagtcagtcccagaccctcaacctctcggagaaccaccagcagcccccacaagtttgggatctaatacaatggcttcaggcggtggcgcaccaatggcagacaataacgagggtgccgatggagtgggtaattcctcaggaaattggcattgcgattcccaatggctgggcgacagagtcatcaccaccagcaccagaacctgggccctgcccacttacaacagccatctctacaagcaaatctccagccaatcaggagcttcaaacgacaaccactactttggctacagcaccccttggggtattttgactttaacagattccactgccacttctcaccacgtgactggcagcgactcattaacaacaactggggattccggcccaagaaactcagcttcaagctcttcaacatccaagttaaagaggtcacgcagaacgatggcacgacgactattgccaataaccttaccagcacggttcaagtgtttacggactcggagtatcagctcccgtacgtgctcgggtcggcgcaccaaggctgtctcccgccgtttccagcggacgccttcatggtccctcagtatggatacctcaccctgaacaacggaagtcaagcggtgggacgctcatccttttactgcctggagtacttcccttcgcagatgctaaggactggaaataacttccaattcagctataccctcgaggatgtaccttttcacagcagctacgctcacagccagagtttggatcgcttgatgaatcctcttattgatcagtatctgtactacctgaacagaacgcaaggaacaacctctggaacaaccaaccaatcacggctgctttttagccaggctgggcctcagtctatgtctttgcaggccagaaattggctacctgggccctgctaccggcaacagagactttcaaagactgctaacgacaacaacaacagtaactttccttggacagcggccagcaaatatcatctcaatggccgcgactcgctggtgaatccaggaccagctatggccagtcacaaaggacgatgaagaaaaatttttccctatgcacggcaatctaatatttggcaaagaagggacaacggcaagtaacgcagaattagatagtgtaatgattacggatgaagaagagattcgtaccaccaatcctgtggcaacagagcagtatggaactgtggcaaataacttgcagagctcaaatacagctcccacgactagaactgtcaatgatcagggggccttacctggcatggtgtggcaagatcgtgacgtgtaccttcaaggacctatctgggcaaagattcctcacacggatggacactttcatccttctcctctgatgggaggctttggactgaaacatccgcctcctcaaatcatgatcaaaaatactccggtaccggcaaatcctccgacgactttcagcccggccaagtttgcttcatttatcactcagtactccactggacaggtcagcgtggaaattgagtgggagctacagaaagaaaacagcaaacgttggaatccagagattcagtacacttccaactacaacaagtctgttaatgtggactttactgtagacactaatggtgtttatagtgaacctcgccctattggaacccggtatctcacacgaaacttgtaa

SEQ ID NO: 790 - DNA, 2205 bp, Artificial Sequence
  source: /note="Description of Artificial Sequence: Synthetic polynucleotide"
atgactgacggttaccttccagattggctagaggacaacctctctgagggcgttcgagagtggtgggcgctgcaacctggagcccctaaacccaaggcaaatcaacaacatcaggacaacgctcggggtcttgtgcttccgggttacaaatacctcggacccggcaacggactcgacaagggggaacccgtcaacgcagcggacgcggcagccctcgagcacgacaaggcctacgaccagcagctcaaggccggtgacaacccctacctcaagtacaaccacgccgacgcggagttccagcagcggcttcagggcgacacatcgtttgggggcaacctcggcagagcagtcttccaggccaaaaagagggttcttgaacctcttggtctggttgagcaagcgggtgagacggctcctggaaagaagagaccgttgattgaatccccccagcagcccgactcctccacgggtatcggcaaaaaaggcaagcagccggctaaaaagaagctcgttttcgaagacgaaactggagcaggcgacggaccccctgagggatcaacttccggagccatgtctgatgacagtgagatgcgtgcagcaactggcggagctgcagtcgagggcggacaaggtgccgatggagtgggtaatgcctcgggtgattggcattgcgattccacctggtctgagggccacgtcacgaccaccagcaccagaacctgggtcttgcccacctacaacaaccacctctacaagcgactcggagagagcctgcagtccaacacctacaacggattctccaccccctggggatactttgacttcaaccgcttccactgccacttctcaccacgtgactggcagcgactcatcaacaacaactggggcatgcgacccaaagccatgcgggtcaaaatcttcaacatccaggtcaaggaggtcacgacgtcgaacggcgagacaacggtggctaataaccttaccagcacggttcagatctttgcggactcgtcgtacgaactgccgtacgtgatggatgcgggtcaagagggcagcctgcctccttttcccaacgacgtctttatggtgccccagtacggctactgtggactggtgaccggcaacacttcgcagcaacagactgacagaaatgccttctactgcctggagtactttccttcgcagatgctgcggactggcaacaactttgaaattacgtacagttttgagaaggtgcctttccactcgatgtacgcgcacagccagagcctggaccggctgatgaaccctctcatcgaccagtacctgtggggactgcaatcgaccaccaccggaaccaccctgaatgccgggactgccaccaccaactttaccaagctgcggcctaccaacctttccaactttaaaaagaactggctgcccgggccttcaatcaagcagcagggcttctcaaagactgccaatcaaaactacaagatccctgccaccgggtcagacagtctcatcaaatacgagacgcacagcactctggacggaagatggagtgccctgacccccggacctccaatggccacggctggacctgcggacagcaagttcagcaacagccagctcatctttgcggggcctaaacagaacggcaacacggccaccgtacccgggactctgatcttcacctctgaggaggagctggcagccaccaacgctaccgatacggacatgtggggcaacctacctggcggtgaccagagcaacagcaacctgccgaccgtggacagactgacagccttgggagccgtgcctggaatggtctggcaaaacagagacatttactaccagggtcccatttgggccaagattcctcataccgatggacactttcacccctcaccgctgattggtgggtttgggctgaaacacccgcctcctcaaatttttatcaagaacaccccggtacctgcgaatcctgcgacgaccttcagctctactccggtaaactccttcattactcagtacagcactggccaggtgtcggtgcagattgactgggagatccagaaggagcggtccaaacgctggaaccccgaggtccagtttacctccaactacggacagcaaaactctctgttgtgggctcccgatgcggctgggaaatacactgagcctagggctatcggtacccgctacctcacccaccacctgtaa

SEQ ID NO: 791 - DNA, 2205 bp, Artificial Sequence
  source: /note="Description of Artificial Sequence: Synthetic polynucleotide"
atgactgacggttaccttccagattggctagaggacaacctctctgaaggcgttcgagagtggtgggcgctgcaacctggagcccctaaacccaaggcaaatcaacaacatcaggacaacgctcggggtcttgtgcttccgggttacaaatacctcggacccggcaacggactcgacaagggggaacccgtcaacgcagcggacgcggcagccctcgagcacgacaaggcctacgaccagcagctcaaggccggtgacaacccctacctcaagtacaaccacgccgacgcggagttccagcagcggcttcagggcgacacatcgtttgggggcaacctcggcagagcagtcttccaggccaaaaagagggttcttgaacctcttggtctggttgagcaagcgggtgagacggctcctggaaagaagagaccgttgattgaatccccccagcagcccgactcctccacgggtatcggcaaaaaaggcaagcagccggctaaaaagaagctcgttttcgaagacgaaactggagcaggcgacggaccccctgagggatcaacttccggagccatgtctgatgacagtgagatgcgtgcagcagctggcggagctgcagtcgagggcggacaaggtgccgatggagtgggtaatgcctcgggtgattggcattgcgattccacctggtctgagggccacgtcacgaccaccagcaccagaacctgggtcttgcccacctacaacaaccacctctacaagcgactcggagagagcctgcagtccaacacctacaacggattctccaccccctggggatactttgacttcaaccgcttccactgccacttcttaccacgtgactggcagcgactcatcaacaacaactggggcgtgcgacccaaagccatgcgggtcaaaatcttcaacatccaggtcaaggaggtcacgacgtcgaacggcgagacaacggtggctaataaccttaccagcacggttcagatctttgcggactcgtcgtacgaactgccgtacgtgatggatgcgggtcaagagggcagcctgcctccttttcccaacgacgtctttatggtgccccagtacggctactgtggactggtgaccggcgacacttcgcagcaacagactgacagaaatgccttctactgcctggagtactttccttcgcagatgctgcggactggcaacaactttgaaattacgtacagttttgagaaggtgcctttccactcgatgtacgcgcacagccagagcctggaccggctgatgaaccctctcatcgaccagtacctgtggggactgcaatcgaccaccaccggaaccaccctgaatgccgggactgccaccaccaactttaccaagctgcggcctaccaacttttccaactttaaaaagaactggctgcccgggccttcaatcaagcagcagggcttctcaaagactgccaatcaaaactacaagatccctgccaccgggtcagacagtctcatcaaatacgagacgcacagcactctggacggaagatggagtgccctgacccccggacctccaatggccacggctggacctgcggacagcaagttcagcaacagccagctcatctttgcggggcctaaacagaacggcaacacggccaccgtacccgggactctgatcttcacctctgaggaggagctggcagccaccaacgccaccgatacggacatgtggggcaacctacctggcggtgaccagagcaacagcaacctgccgaccgtggacagactgacagccttgggagccgtgcctggaatggtctggcaaaacagagacatttactaccagggtcccatttgggccaagattcctcataccgatggacactttcacccctcaccgctgattggtgggtttgggctgaaacacccgcctcctcaaatttttatcaagaacaccccggtacctgcgaatcctgcgacgaccttcagctctactccggtaaactccttcattactcagtacagcactggccaggtgtcggtgcagattgactgggagatccagaaggagcggtccaaacgctggaaccccgaggtccagtttacctccaactacggacagcaaaactctctgttgtgggctcccgatgcggctgggaaatacactgagcctagggctatcggtacccgctacctcacccaccacctgtaa

SEQ ID NO: 792 - DNA, 2205 bp, Artificial Sequence
  source: /note="Description of Artificial Sequence: Synthetic polynucleotide"
atgactgacggttaccttccagattggctagaggacaacctctctgaaggcgttcgagagtggtgggcgctgcaacctggagcccctaaacccaaggcaaatcaacaacatcaggacaacgctcggggtcttgtgcttccgggttacaaatacctcggacccggcaacggactcgacgagggggaacccgtcaacgcagcggacgcggcagccctcgagcacgacaaggcctacgaccagcagctcaaggccggtgacaacccctacctcaagtacaaccacgccgacgcggagttccagcagcggcttcagggcgacacatcgtttgggggcaacctcggcagagcagtcttccaggccaaaaagagggttcttgaacctcttggtctggttgagcaagcgggtgagacggctcctggaaagaagagaccgttgattgaatccccccagcagcccgactcctccacgggtatcggcaaaaaaggcaagcagccggctaaaaagaagctcgttttcgaagacgaaactggagcaggcgacggaccccctgagggatcaacttccggagccatgtctgatgacagtgagatgcgtgcagcagctggcggagctgcagtcgagggcggacaaggtgccgatggagtgggtaatgcctcgggtgattggcattgcgattccacctggtctgagggccacgtcacgaccaccagcaccagaacctgggtcttgcccacctacaacaaccacctctacaagcgactcggagagagcctgcagtccaacacctacaacggattctccaccccctggggatactttgacttcaaccgcttccactgccacttctcaccacgtgactggcagcgactcatcaacaacaactggggcatgcgacccaaagccatgcgggtcaaaatcttcaacatccaggtcaaggaggtcacgacgtcgaacggcgagacaacggtggctaataaccttaccagcacggttcagatctttgcggactcgtcgtacgaactgccgtacgtgatggatgcgggtcaagagggcagcctgcctccttttcccaacgacgtctttatggtgccccagtacggctactgtggactggtgaccggcaacacttcgcagcaacagactgacagaaatgccttctactgcctggagtactttccttcgcagatgctgcggactggcaacaactttgaaattacgtacagttttgagaaggtgcctttccactcgatgtacgcgcacagccagagcctggaccggctgatgaaccctctcatcgaccagtacctgtggggactgcaatcgaccaccaccggaaccaccctgaatgccgggactgccaccaccaactttaccaagctgcggcctaccaacttttccaactttaaaaagaactggctgcccgggccttcaatcaagcagcagggcttctcaaagactgccaatcaaaactacaagatccctgccaccgggtcagacagtctcatcaaatacgagacgcacagcactctggacggaagatggagtgccctgacccccggacctccaatggccacggctggacctgcggacagcaagttcagcaacagccagctcatctttgcggggcctaaacagaacggcaacacggccaccgtacccgggactctgatcttcacctctgaggaggagctggcagccaccaacgctaccgatacggacatgtggggcaacctacctggcggtgaccagagcaacagcaacctgccgaccgtggacagactgacagccttgggagccgtgcctggaatggtctggcaaaacagagacatttactaccagggtcccatttgggccaagattcctcataccgatggacactttcacccctcaccgctgattggtgggtttgggctgaaacacccgcctcctcaaatttttatcaagaacaccccggtacctgcgaatcctgcgacgaccttcagctctactccggtaaactccttcattactcagtacagcactggccaggtgtcggtgcagattgactgggagatccagaaggagcggtccaaacgctggaaccccgaggtccagtttacctccaactacggacagcaaaactctctgttgtgggctcccgatgcggctgggaaatacactgagcctagggctatcggtacccgctacctcacccaccacctgtaa

SEQ ID NO: 793 - DNA, 2205 bp, Artificial Sequence
  source: /note="Description of Artificial Sequence: Synthetic polynucleotide"
atgactgacggttaccttccagattggctagaggacaacctctctgaaggcgttcgagagtggtgggcgctgcaacctggagcccctaaacccaaggcaaatcaacaacatcaggacaacgctcggggtcttgtgcttccgggttacaaatacctcggacccggcaacggactcgacaagggggaacccgtcaacgcagcggacgcggcagccctcgagcacgacaaggcctacgaccagcagctcaaggccggtgacaacccctacctcaagtacaaccacgccgacgcggagttccagcagcggcttcagggcgacacatcgtttgggggcaacctcggcagagcagtcttccaggccaaaaagagggttcttgaacctcttggtctggttgagcaagcgggtgagacggctcctggaaagaagagaccgttgattgaatccccccagcagcccgactcctccacgggtatcggcaaaaaaggcaagcagccggctaaaaagaagctcgttttcgaagacggaactggagcaggcgacggaccccctgagggatcaacttccggagccatgtctgatgacagtgagatgcgtgcagcagctggcggagctgcagtcgagggcggacaaggtgccgatggagtgggtaatgcctcgggtgattggcattgcgattccacctggtctgagggccacgtcacgaccaccagcaccagaacctgggtcttgcccacctacaacaaccacctctacaagcgactcggagagagcctgcagtccaacacctacaacggattccccaccccctggggatactttgacttcaaccgcttccactgccacttctcaccacgtgactggcagcgactcatcaacaacaactggggcatgcgacccaaagccatgcgggtcaaaatcttcaacatccaggtcaaggaggtcacgacgtcgaacggcgagacaacggcggctaataaccttaccagcacggttcagatctttgcggactcgtcgtacgaactgccgtacgtgatggatgcgggtcaagagggcagcctgcctccttttcccaacgacgtctttatggtgccccagtacggctactgtggactggtgaccggcaacacttcgcagcaacagactgacagaaatgccttctactgcctggagtactttccttcgcagatgctgcggactggcaacaactttgaaattacgtacagttttgagaaggtgcctttccactcgatgtacgcgcacagccagagcctggaccggctgatgaaccctctcatcgaccagtacctgtggggactgcaatcgaccaccaccggaaccaccctgaatgccgggactgccaccaccaactttaccaagctgcggcctaccaacttttccaactttaaaaagaactggctgcccgggccttcaatcaagcagcagggcttctcaaagactgccaatcaaaactacaagatccctgccaccgggtcagacagtctcatcaaatacgagacgcacagcactctggacggaagatggagtgccctgacccccggacctccaatggccacggctggacctgcggacagcaagttcagcaacagccagctcatctttgcggggcctaaacagaacggcaacacggccaccgtacccgggactctgatcttcacctctgaggaggagctggcagccaccaacgccaccgatacggacatgtggggcaacctacctggcggtgaccagagcaacagcaacctgccgaccgtggacagactgacagccttgggagccgtgcctggaatggtctggcaaaacagagacatttactaccagggtcccatttgggccaagattcctcataccgatggacactttcacccctcaccgctgattggtgggtttgggctgaaacacccgcctcctcaaatttttatcaagaacaccccggtacctgcgaatcctgcgacgaccttcagctctactccggtaaactccttcattactcagtacagcactggccaggtgtcggtgcagattgactgggagatccagaaggagcggtccaaacgctggaaccccgaggtccagtttacctccaactacggacagcaaaactctctgttgtgggctcccgatgcggctgggaaatacactgagcctagggctatcggtacccgctacctcacccaccacctgtaa

SEQ ID NO: 794 - DNA, 2205 bp, Artificial Sequence
  source: /note="Description of Artificial Sequence: Synthetic polynucleotide"
atgactgacggttaccttccagattggctagaggacaacctctctgaaggcgttcgagagtggtgggcgctgcaacctggagcccctaaacccaaggcaaatcaacaacatcaggacaacgctcggggtcttgtgcttccgggttacaaatacctcggacccggcaacggactcgacaagggggaacccgtcaacgcagcggacgcggcagccctcgagcacgacaaggcctacgaccagcagctcaaggccggtgacaacccctacctcaagtacaaccacgccgacgcggagttccagcagcggcttcagggcgacacatcgtttgggggcaacctcggcagagcagtcttccaggccaaaaagagggttcttgaacctcttggtctggttgagcaagcgggtgagacggctcctggaaagaagagaccgttgattgaatccccccagcagcccgactcctccacgggtatcggcaaaaaaggcaagcagccggctaaaaagaagctcgttttcgaagacgaaactggagcaggcgacggaccccctgagggatcaacttccggagccatgtctgatgacagtgagatgcgtgcagcagctggcggagctgcagtcgagggcggacaaggtgccgatggagtgggtaatgcctcgggtgattggcattgcgattccacctggtctgagggccacgtcacgaccaccagcaccagaacctgggtcttgcccacctacaacaaccacctctacaagcgactcggagagagcctgcagtccaacacctacaacggattctccaccccctggggatactttgacttcaaccgcttccactgccacttctcaccacgtgactggcagcgactcatcaacaacaactggggcatgcgacccaaagccatgcgggtcaaaatcttcaacatccaggtcaaggaggtcacgacgtcgaacggcgagacaacggtggctaataaccttaccagcacggttcagatctttgcggactcgtcgtacgaactgccgtacgtgatggatgcgggtcaagagggcagcctgcctccttttcccaacgacgtctttatggtgccccagtacggctaccgtggactggtgaccggcaacacttcgcagcaacagactgacagaaatgccttctactgcctggagtactttccttcgcagatgctgcggactggcaacaactttgaaattacgtacagttttgagaaggtgcctttccactcgatgtacgcgcacagccagagcctggaccggctgatgaaccctctcatcgaccagtacctgtggggactgcaatcgaccaccaccggaaccaccctgaatgccgggactgccaccaccaactttaccaagctgcggcctaccaacttttccaactttaaaaagaactggctgcccgggccttcaatcaagcagcagggcttctcaaagactgccaatcaaaactacaagatccctgccaccgggtcagacagtctcatcaaatacgagacgcacagcactctggacggaagatggagtgccctgacccccggacctccaatggccacggctggacctgcggacagcaagttcagcaacagccagctcatctttgcggggcctaaacagaacggcaacacggccaccgtacccgggactctgatcttcacctctgaggaggagctggcagccaccaacgccaccgatacggacatgtggggcaacctacctggcggtgaccagagcaacagcaacctgccgaccgtggacagactgacagccttgggagccgtgcctggaatggtctggcaaaacagagacatttactaccagggtcccatttgggccaagattcctcataccgatggacactttcacccctcaccgctgattggtgggtttgggctgaaacacccgcctcctcaaatttttatcaagaacaccccggtacctgcgaatcctgcgacgaccttcagctctactccggtaaactccttcattactcagtacagcactggccaggtgtcggtgcagattgactgggagatccagaaggagcggtccaaacgctggaaccccgaggtccagtttacctccaactacggacagcaaaactctctgttgtgggctcccgatgcggctgggaaatacactgagcctagggctatcggtacccgctacctcacccaccacctgtaa

SEQ ID NO: 795 - DNA, 2205 bp, Artificial Sequence
  source: /note="Description of Artificial Sequence: Synthetic polynucleotide"
atgactgacggttaccttccagattggctagaggacaacctctctgaaggcgttcgagagtggtgggcgctgcaacctggagcccctaaacccaaggcaaatcaacaacatcaggacaacgctcggggtcttgtgcttcagggttacaaatacctcggacccggcaacggactcgacaagggggaacccgtcaacgcagcggacgcggcagccctcgagcacgacaaggcctacgaccagcagctcaaggccggtgacaacccctacctcaagtacaaccacgccgacgcggagttccagcagcggcttcagggcgacacatcgtttgggggcaacctcggcagagcagtcttccaggccaaaaagagggttcttgaaccccttggtctggttgagcaagcgggtgagacggctcctggaaagaagagaccgttgattgaatccccccagcagcccgactcctccacgggtatcggcaaaaaaggcaagcagccggctaaaaagaagctcgttttcgaagacgaaactggagcaggcgacggaccccctgagggatcaacttccggagccatgtctgatgacagtgagatgcgtgcagcagctggcggagctgcagtcgagggcggacaaggtgccgatggagtgggtaatgcctcgggtgattggcattgcgattccacccggtctgagggccacgtcacgaccaccagcaccagaacctgggtcttgcccacctacaacaaccacctctacaagcgactcggagagagcctgcagtccaacacctacaacggattctccaccccctggggatactttgacttcaaccgcttccactgccacttctcaccacgtgactggcagcgactcatcaacaataactggggcatgcgacccaaagccatgcgggtcaaaatcttcaacatccaggtcaaggaggtcacgacgtcgaacggcgagacaacggtggctaataaccttaccagcacggttcagatctttgcggactcgtcgtacgaactgccgtacgtgatggatgcgggtcaagagggcagcctgcctccttttcccaacgacgtctttatggtgccccagtacggctactgtggactggtgaccggcaacacttcgcagcaacagactgacagaaatgccttctactgcctggagtactttccttcgcagatgctgcggactggcaacaactttgaaattacgtacagttttgagaaggtgcctttccactcgatgtacgcgcacagccagagcctggaccggctgatgaaccctctcatcgaccagtacctgtggggactgcaatcgaccaccaccggaaccaccctgaatgccgggactgccaccaccaactttaccaagctgcggcctaccaacttttccaactttaaaaagaactggctgcccgggccttcaatcaagcagcagggcttctcaaagactgccaatcaaaactacaagatccctgccaccgggtcagacagtctcatcaaatacgagacgcacagcactctggacggaagatggagtgcccggacccccggacctccaatggccacggctggacctgcggacagcaagttcagcaacagccagctcatctttgcggggcctaaacagaacggcaacacggccaccgtacccgggactctgatcttcacctctgaggaggagctggcagccaccaacgccaccgatacggacatgtggggcaacctacctggcggtgaccagagcaacagcaacctgccgaccgtggacagactgacagccttgggagccgtgcctggaatggtctggcaaaacagagacatttactaccagggtcccatttgggccaagattcctcataccgatggacactttcacccctcaccgctgattggtgggtttgggctgaaacacccgcctcctcaaatttttatcaagaacaccccggtacctgcgaatcctgcgacgaccttcagctctactccggtaaactccttcattactcagtacagcactggccaggtgtcggtgcagattgactgggagatccagaaggagcggtccaaacgctggaaccccgaggtccagtttacctccaactacggacagcaaaactctctgttgtgggctcccgatgcggctgggaaatacactgagcctagggctatcggtacccgctacctcacccaccacctgtaa

SEQ ID NO: 796 - DNA, 2175 bp, Artificial Sequence
  source: /note="Description of Artificial Sequence: Synthetic polynucleotide"
atgtcttttgttgatcaccctccagattggttggaagaagttggtgaaggtcttcgcgagtttttgggccttgaagcgggcccaccgaaaccaaaacccaatcagcagcatcaagatcaagcccgtggtcttgtgctgcctggttataactatctcggacccggaaacggtctcgatcgaggagagcctgtcaacagggcagacgaggtcgcgcgagagcacgacatctcgtacaacgagcagcttgaggcgggagacaacccctacctcaagtacaaccacgcggacgccgagtttcaggagaggctcgccgacgacacatccttcgggggaaacctcggaaaggcagtctttcaggccaagaaaagggttctcgaaccttttggcctggttgaagagggtgctaagacggcccctaccggaaagcggatagacgaccactttccaaaaagaaagaaggcccggaccgaagaggactccaagccttccacctcgtcagacgccgaagctggacccagcggatcccagcagctgcaaatcccagcccaaccagcctcaagtttgggagctgatacaatgtctgcgggaggtggcggcccattgggcgacaataaccaaggtgccgatggagtgggcaatgcctcgggagattggcattgcgattccacgtggatgggggacagagtcgtcaccaagtccacccgaacctgggtgctgcccagctacaacaaccaccagtaccgagagatcaaaagcggctccgtcgacggaagcaacgccaacgcctactttggatacagcaccccctgggggtactttgactttaaccgcttccacagccactggagcccccgagactggcaaagactcatcaacaactactggggcttcagaccccggtccctcagagtcaaaatcttcaacattcaagtcaaagaggtcacggtgcaggactccaccaccaccatcgccaacaacctcacctccaccgtccaagtgtttacggacgacgactaccagctgccctacgtcgtcggcaacgggaccgagggatgcctgccggccttccctccgcaggtctttacgctgccgcagtacggttacgcgacgctgaaccgcgacaacacagaaaatcccaccgagaggagcagcttcttctgcctagagtactttcccagcaagatgctgagaacgggcaacaactttgagtttacctacaactttgaggaggtgcccttccactccagcttcgctcccagtcagaacctcttcaagctggccaacccgctggtggaccagtacttgtaccgcttcgtgagcacaaataacactggcggagtccagttcaacaagaacctggccgggagatacgccaacacctacaaaaactggttcccggggcccatgggccgaacccagggctggaacctgggctccggggtcaaccgcgccagtgtcagcgccttcgccacgaccaataggatggagctcgagggcgcgagttaccaggtgcccccgcagccgaacggcatgaccaacaacctccagggcagcaacacctatgccctggagaacactatgatcttcaacagccagccggcgaacccgggcaccaccgccacgtacctcgagggcaacatgctcatcaccagcgagagcgagacgcagccggtgaaccgcgtggcgtacaacgtcggcgggcagatggccaccaacaaccagagctccaccactgcccccgcgaccggcacgtacaacctccaggaaatcgtgcccggcagcgtgtggatggagagggacgtgtacctccaaggacccatctgggccaagatcccagagacggaggcgcactttcacccctctccggccatgggcggattcggactcaaacacccaccgcccatgatgctcatcaagaacacgcctgtgcccggaaatatcaccagcttctcggacgtgcccgtcagcagcttcatcacccagtacagcaccgggcaggtcaccgtggagatggagtgggagctcaagaaggaaaactccaagaggtggaacccagagatccagtacacaaacaactacaacgacccccagtttgtggactttgccccggacagcaccggggaatacagaaccaccagacctatcggaacccgataccttacccgacccctttaa

SEQ ID NO: 797 - DNA, 2175 bp, Artificial Sequence
  source: /note="Description of Artificial Sequence: Synthetic polynucleotide"
atgtcttttgttgatcaccctccagattggttggaagaagttggtgaaggtcttcgcgagtttttgggccttgaagcgggcccaccgaaaccaaaacccaatcagcagcatcaagatcaagcccgtggtcttgtgctgcctggttataactatctcggacccggaaacggtctcgatcgaggagagcctgtcaacagggcagacgaggtcgcgcgagagcacgacatctcgtacaacgagcagcttgaggcgggagacaacccctacctcaagtacaaccacgcggacgccgagtttcaggagaagctcgccgacgacacatcctccgggggaaacctcggaaaggcagtctttcaggccaagaaaagggttctcgaaccttttggcctggttgaagagggtgctaagacggcccctaccggaaagcggatagacgaccactttccaaaaagaaagaaggcccggaccgaagaggactccaagccttccacctcgtcagacgccgaagctggacccagcggatcccagcagctgcaaatcccagcccaaccagcctcaagtttgggagctgatacaatgtctgcgggaggtggcggcccattgggcgacaataaccaaggtgccgatggagtgggcaatgcctcgggagattggcattgcgattccacgtggatgggggacagagtcgtcaccaagtccacccgaacctgggtgctgcccagctacaacaaccaccagtaccgagagatcaaaagcggctccgtcgacggaagcaacgccaacgcctactttggatacagcaccccctgggggtactttgactttaaccgcttccacagccactggagcccccgagactggcaaagactcatcaacaactactggggcttcagaccccggtccctcagagtcaaaatcttcaacattcaagtcaaagaggtcacggtgcaggactccaccaccaccatcgccaacaacctcacctccaccgtccaagtgtttacggacgacgactaccagctgccctacgtcgtcggcaacgggaccgagggatgcctgccggccttccctccgcaggtctttacgctgccgcagtacggttacgcgacgctgaaccgcgacaacacagaaaatcccaccgagaggagcagcttcttctgcctagagtactttcccagcaagatgctgagaacgggcaacaactttgagtttacctacaactttgaggaggtgcccttccactccagcttcgctcccagtcagaacctcttcaagctggccaacccgctagtggaccagtacttgtaccgcttcgtgagcacaaataacactggcggagtccagttcaacaagaacctggccgggagatacgccaacacctacaaaaactggttcccggggcccatgggccgaacccagggctggaacctgggctccggggtcaaccgcgccagtgtcagcgccttcgccacgaccaataggatggagctcgagggcgcgagttaccaggtgcccccgcagccgaacggcatgaccaacaacctccagggcagcaacacctatgccctggagaacactatgatcttcaacagccagccggcgaacccgggcaccaccgccacgtacctcgagggcaacatgctcatcaccagcgagagcgagacgcagccggtgaaccgcgtggcgtacaacgtcggcgggcagatggccaccaacaaccagagctccaccactgcccccgcgaccggcacgtacaacctccaggaaatcgtgcccggcagcgtgtggatggagagggacgtgtacctccaaggacccatctgggccaagatcccagagacgggggcgcactttcacccctctccggccatgggcggattcggactcaaacacccaccgcccatgatgctcatcaagaacacgcctgtgcccggaaatatcaccagcttctcggacgtgcccgtcagcagcttcatcacccagtacagcaccgggcaggtcaccgtggagatggagtgggagctcaagaaggaaaactccaagaggtggaacccagagatccagtacacaaacaactacaacgacccccagtttgtggactttgccccggacagcaccggggaatacagaaccaccagacctatcggaacccgataccttacccgacccctttaa

SEQ ID NO: 798 - DNA, 2175 bp, Artificial Sequence
  source: /note="Description of Artificial Sequence: Synthetic polynucleotide"
atgtcttttgttgatcaccctccagattggttggaagaagttggtgaaggtcttcgcgagtttttgggccttgaagcgggcccaccgaaaccaaaacccaatcagcagcatcaagatcaagcccgtggtcttgtgctgcctggttataactatctcggacccggaaacggtctcgatcgaggagagcctgtcaacagggcagacgaggtcgcgcgagagcacgacatctcgtacaacgagcagcttgaggcgggagacaacccctacctcaagtacaaccacgcggacgccgagtttcaggagaagctcgccgacgacacatccttcgggggaaacctcggaaaggcagtctttcaggccaagaaaagggttctcgaaccttttggcctggttgaagagggtgctaagacggcccctaccggaaagcggatagacgaccactttccaaaaagaaagaaggcccggaccgaagaggactccaagccttccacctcgtcagacgccgaagctggacccagcggatcccagcagctgcaaatcccagcccaaccagcctcaagtttgggagctgatacaatgtctgcgggaggtggcggcccattgggcgacaataaccaaggtgccgatggagtgggcaatgcctcgggagattggcattgcgattccacgtggatgggggacagagtcgtcaccaagtccacccgaacctgggtgctgcccagctacaacaaccaccagtaccgagagatcaaaagcggctccgtcgacggaagcaacgccaacgcctactttggatacagcaccccctgggggtactttgactttaaccgcttccacagccactggagcccccgagactggcaaagactcatcaacaactactggggcttcagaccccggtccctcagagtcaaaatcttcaacattcaagtcaaagaggtcacggtgcaggactccaccaccaccatcgccaacaacctcacctccaccgtccaagtgtttacggacgacgactaccagctgccctacgtcgtcggcaacgggaccgagggatgcctgccggccttccctccgcaggtctttacgctgccgcagtacggttacgcgacactgaaccgcgacaacacagaaaatcccaccgagaggagcagcttcttctgcctagagtactttcccagcaagatgctgagaacgggcaacaactttgagtttacctacaactttgaggaggtgcccttccactccagcttcgctcccagtcagaacctcttcaagctggccaacccgctggtggaccagtacttgtaccgcttcgtgagcacaaataacactggcggagtccagttcaacaagaacctggccgggagatacgccaacacctacaaaaactggttcccggggcccatgggccgaacccagggctggaacctgggctccggggtcaaccgcgccagtgtcagcgccttcgccacgaccaataggatggagctcgagggcgcgagttaccaggtgcccccgcagccgaacggcatgaccaacaacctccagggcagcaacacctatgccctggagaacactatgatcttcaacagccagccggcgaacccgggcaccaccgccacgtacctcgagggcaacatgctcatcaccagcgagagcgagacgcagccggtgaaccgcgtggcgtacaacgtcggcgggcagatggccaccaacaaccagagctccaccactgcccccgcgaccggcacgtacaacctccaggaaatcgtgcccggcagcgtgtggatggagagggacgtgtacctccaaggacccatctgggccaagatcccagagacgggggcgcactttcacccctctccggccatgggcggattcggactcaaacacccaccgcccatgatgctcatcaagagcacgcctgtgcccggaaatatcaccagcttctcggacgtgcccgtcagcagcttcatcacccagtacagcaccgggcaggtcaccgtggagatggagtgggagctcaagaaggaaaactccaagaggtggaacccagagatccagtacacaaacaactacaacgacccccagtttgtggactttgccccggacagcaccggggaatacagaaccaccagacctatcggaacccgataccttacccgacccctttaa

SEQ ID NO: 799 - DNA, 2175 bp, Artificial Sequence
  source: /note="Description of Artificial Sequence: Synthetic polynucleotide"
atgtcttttgttgatcaccctccagattggttggaagaagttggtgaaggtcttcgcgagtttttgggccctgaagcgggcccaccgaaaccaaaacccaatcagcagcatcaagatcaagcccgtggtcttgtgctgcctggttataactatctcggacccggaaacggtctcgatcgaggagagcctgtcaacagggcagacgaggtcgcgcgagagcacgacatctcgtacaacgagcagcttgaggcgggagacaacccctacctcaagtacaaccacgcggacgccgagtttcaggagaagctcgccgacgacacatccttcgggggaaacctcggaaaggcagtctttcaggccaagaaaagggttctcgaaccttttggcctggttgaagagggtgctaagacggcccctaccggaaagcggatagacgaccactttccaaaaagaaagaaggtccggaccgaagaggactccaagccttccacctcgtcagacgccgaagctggacccagcggatcccagcagctgcaaatcccagcccaaccagcctcaagtttgggagctgatacaatgtctgcgggaggtggcggcccattgggcgacaataaccaaggtgccgatggagtgggcaatgcctcgggagattggcattgcgattccacgtggatgggggacagagtcgtcaccaagtccacccgaacctgggtgccgcccagctacaacaaccaccagtaccgagagatcaaaagcggctccgtcgacggaagcaacgccaacgcctactttggatacagcaccccctgggggtactttgactttaaccgcttccacagccactggagcccccgagactggcaaagactcatcaacaactactggggcttcagaccccggtccctcagagtcaaaatcttcaacattcaagtcaaagaggtcacggtgcaggactccaccaccaccatcgccaacaacctcacctccaccgtccaagtgtttacggacgacgactaccagctgccctacgtcgtcggcaacgggaccgagggatgcctgccggccttccctccgcaggtctttacgctgccgcagtacggttacgcgacgctgaaccgcgacaacacagaaaatcccaccgagaggagcagcttcttctgcctagagtactttcccagcaagatgctgagaacgggcaacaactttgagtttacctacaactttgaggaggtgcccttccactccagcttcgctcccagtcagaacctcttcaagctggccaacccgctggtggaccagtacttgtaccgcttcgtgagcacaaataacactggcggagtccagttcaacaagaacctggccgggagatacgccaacacctacaaaaactggttcccggggcccatgggccgaacccagggctggaacctgggctccggggtcaaccgcgccagtgtcagcgccttcgccacgaccaataggatggagctcgagggcgcgagttaccaggtgcccccgcagccgaacggcatgaccaacaacctccagggcagcaacacctatgccctggagaacactatgatcttcaacagccagccggcgaacccgggcaccaccgccacgtacctcgagggcaacatgctcatcaccagcgagagcgagacgcagccggtgaaccgcgtggcgtgcaacgtcggcgggcagatggccaccaacaaccagagctccaccactgcccccgcgaccggcacgtacaacctccaggaaatcgtgcccggcagcgtgtggatggagagggacgtgtacctccaaggacccatctgggccaagatcccagagacgggggcgcactttcacccctctccggccatgggcggattcggactcaaacacccaccgcccatgatgctcatcaagaacacgcctgtgcccggaaatatcaccagcttctcggacgtgcccgtcagcagcttcatcacccagtacagcaccgggcaggtcaccgtggagatggagtgggagctcaagaaggaaaactccaagaggtggaacccagagatccagtacacaaacaactacaacgacccccagtttgtggactttgccccggacagcaccggggaatacagaaccaccagacctattggaacccgataccttacccgacccctttaa

SEQ ID NO: 800 - DNA, 2175 bp, Artificial Sequence
  source: /note="Description of Artificial Sequence: Synthetic polynucleotide"
atgtcttttgttgatcaccctccagattggttggaagaagttggtgaaggtcttcgcgagtttttgggccttgaagcgggcccaccgaaaccaaaacccaatcagcagcatcaagatcaagcccgtggtcttgtgctgcctggttataactatctcggacccggaaacggtctcgatcgaggagagcctgtcaacagggcagacgaggtcgcgcgagagcacgacatctcgtacaacgagcagcttgaggcgggagacaacccctacctcaagtacaaccacgcggacgccgagtttcaggagaagctcgccgacgacacatccttcgggggaaacctcggaaaggcagtctttcaggccaagaaaagggttctcgaaccttttggcctggttgaagagggtgctaagacggcccctaccggaaagcggatagacgaccactttccaaaaagaaagaaggcccggaccgaagaggactccaagccttccacctcgtcagacgccgaagctggacccagcggatcccagcagctgcaaatcccagcccaaccagcctcaagtttgggagctgatacaatgtctgcgggaggtggcggcccattgggcgacaataaccaaggtgccgatggagtgggcaatgcctcgggagattggcattgcgattccacgtggatgggggacagagtcgtcaccaagtccacccgaacctgggtgctgcccagctacaacaaccaccagtaccgagagatcaaaagcggctccgtcgacggaagcaacgccaacgcctactttggatacagcaccccctgggggtactttgactttaaccgcttccacagccactggagcccccgagactggcaaagactcatcaacaactactggggcttcagaccccggtccctcagagtcaaaatcttcaacattcaagtcaaagaggtcacggtgcaggactccaccaccaccatcgccaacaacctcacctccaccgtccaagtgtttacggacgacgactaccagctgccctacgtcgtcggcaacgggaccgagggatgcctgccggccttccctccgcaggtctttacgctgccgcagtacggttacgcgacgctgaaccgcgacaacaccgaaaatcccaccgagaggagcagcttcttctgcctagagtactttcccagcaagatgctgagaacgggcaacaactttgagtttacctacaactttgaggaggtgcccttccactccagcttcgctcccagtcagaacctcttcaagctggccaacccgctggtggaccagtacttgtaccgcttcgtgagcacaaataacactggcggagtccagttcaacaagaacctggccgggagatacgccaacacctacaaaaactggttcccggggcccatgggccgaacccagggctggaacctgggctccggggtcaaccgcgccagtgtcagcgccttcgccacgaccaataggatggagctcgagggcgcgagttaccaggtgcccccgcagccgaacggcatgaccaacaacctccagggcagcaacacctatgccctggagaacactatgatcttcaacagccagccggcgaacccgggcaccaccgccacgtacctcgagggcaacatgctcatcaccagcgagagcgagacgcagccggtgaaccgcgtggcgtacaacgtcggcgggcagatggccaccaacaaccagagctccaccactgcccccgcgaccggcgcgtacaacctccaggaaatcgtgcccggcagcgtgtggatggagagggacgtgtacctccaaggacccatctgggccaagatcccagagacgggggcgcactttcacccctctccggccatgggcggattcggactcaaacacccaccgcccatgatgctcatcaagaacacgcctgtgcccggaaatatcaccagcttctcggacgtgcccgtcagcagcttcatcacccagtacagcaccgggcaggtcaccgtggagatggagtgggagctcaagaaggaaaactccaagaggtggaacccagagatccagtacacaaacaactacaacgacccccagtttgtggactttgccccggacagcaccggggaatacagaaccaccagacctatcggaacccgataccttacccgacccctttaa

SEQ ID NO: 801 - DNA, 2175 bp, Artificial Sequence
  source: /note="Description of Artificial Sequence: Synthetic polynucleotide"
atgtcttttgttgatcaccctccagattggttggaagaagttggtgaaggtcttcgcgagtttttgggccttgaagcgggcccaccgaaaccaaaacccaatcagcagcatcaagatcaagcccgtggtcttgtgctgcctggttataactatctcggacccggaaacggtctcgatcgaggagagcctgtcaacagggcagacggggtcgcgcgagagcacgacatctcgtacaacgagcagcttgaggcgggagacaacccctacctcaagtacaaccacgcggacgccgagtttcaggagaagctcgccgacgacacatccttcgggggaaacctcggaaaggcagtctttcaggccaagaaaagggttctcgaaccttttggcctggttgaagagggtgctaagacggcccctaccggaaagcggatagacgaccactttccaaaaagaaagaaggcccggaccgaagaggactccaagccttccacctcgtcagacgccgaagctggacccagcggatcccagcagctgcaaatcccagcccaaccagcctcaagtttgggagctgatacaatgtctgcgggaggtggcggcccattgggcgacaataaccaaggtgccgatggagtgggcaatgcctcgggagattggcattgcgattccacgtggatgggggacagagtcgtcaccaagtccacccgaacctgggtgctgcccagctacaacaaccaccagtaccgagagatcaaaagcggctccgtcgacggaagcaacgccaacgcctactttggatacagcaccccctgggggtactttgactttaaccgcttccacagccactggagcccccgagactggcaaagactcatcaacaactactggggcttcagaccccggtccctcagagtcaaaatcttcaacattcaagtcaaagaggtcacggtgcaggactccaccaccaccatcgccaacaacctcacctccaccgtccaagcgtttacggacgacgactaccagctgccctacgtcgtcggcaacgggaccgagggatgcctgccggccttccctccgcaggtctttacgctgccgcagtacggttacgcgacgctgaaccgcgacaacacagaaaatcccaccgagaggagcagcttcttctgcctagagtactttcccagcaagatgctgagaacgggcaacaactttgagtttacctacaactttgaggaggtgcccttccactccagcttcgctcccagtcagaacctcttcaagctggccaacccgctggtggaccagtacttgtaccgcttcgtgagcacaaataacactggcggagtccagttcaacaagaacctggccgggagatacgccaacacctacaaaaactggttcccggggcccatgggccgaacccagggctggaacctgggctccggggtcaaccgcgccagtgtcagcgccttcgccacgaccaataggatggagctcgagggcgcgagttaccaggtgcccccgcagccgaacggcatgaccaacaacctccagggcagcaacacctatgccctggagaacactatgatcttcaacagccagccggcgaacccgggcaccaccgccacgtacctcgagggcaacatgctcatcaccagcgagagcgagacgcagccggtgaaccgcgtggcgtacaacgtcggcgggcagatggccaccaacaaccagagctccaccactgcccccgcgaccggcacgtacaacctccaggaaatcgtgcccggcagcgtgtggatggagagggacgtgtacctccaaggacccatctgggccaagatcccagagacgggggcgcactttcacccctctccggccatgggcggattcggactcaaacacccaccgcccatgatgctcatcaagaacacgcctgtgcccggaaatatcaccagcttctcggacgtgcccgtcagcagcttcatcacccagtacagcaccgggcaggtcaccgtggagatggagtgggagctcaagaaggaaaactccaagaggtggaacccagagatccagtacacaaacaactacaacgacccccagtttgtggactttgccccggacagcaccggggaatacagaaccaccagacctatcggaacccgataccttacccgacccctttaa

SEQ ID NO: 802 - DNA, 2175 bp, Artificial Sequence
  source: /note="Description of Artificial Sequence: Synthetic polynucleotide"
atgtcttttgttgatcaccctccagattggttggaagaagttggtgaaggtcttcgcgagtttttgggccttgaagcgggcccaccgaaaccaaaacccaatcagcagcatcaagatcaagcccgtggtcttgtgctgcctggttataactatctcggacccggaaacggtctcgatcgaggagagcctgtcaacagggcagacgaggtcgcgcgagagcacgacatctcgtacaacgagcagcttgaggcgggagacaacccctacctcaagtacaaccacgcggacgccgagtttcaggagaagctcgccgacgacacatccttcgggggaaacctcggaaaggcagtctttcaggccaagaaaagggttctcgaaccttttggcctggttgaagagggtgctaagacggcccctaccggaaagcggatagacgaccactttccaaaaagaaagaaggcccggaccgaagaggactccaagccttccacctcgtcagacgccgaagctggacccagcggatcccagcagctgcaaatcccagcccaaccagcctcaagtttgggagctgatacaatgtctgcgggaggtggcggcccattgggcgacaataaccaaggtgccgatggagtgggcaatgcctcgggagattggcattgcgattccacgtggatgggggacagagtcgtcaccaagtccacccgaacctgggtgctgcccagctacaacaaccaccagtaccgagagatcaaaagcggctccgtcgacggaagcaacgccaacgcctactttggatacagcaccccctgggggtactttgactttaaccgcttccacagccactggagcccccgagactggcaaagactcatcaacaactactggggcttcagaccccggtccctcagagtcaaaatcttcaacattcaagtcaaagaggtcacggtgcaggactccaccaccaccatcgccaacaacctcacctccaccgtccaagtgtttacggacgacgactaccagctgccctacgtcgtcggcaacgggaccgagggatgcctgccggccttccctccgcaggtctttacgctgccgcagtacggttacgcgacgctgaaccgcgacaacacagaaaatcccaccgagaggagcagcttcttctgcctagagtactttcccagcaagatgctgagaacgggcaacaactttgagtttacctacaactttgaggaggtgcccttccactccagcttcgctcccagtcagaacctcttcaagctggccaacccgctggtggaccagtacttgtaccgcttcgtgagcacaaataacactggcggagtccagttcaacaagaacctggccgggagatacgccaacacctacaaaaactggttcccggggcccatgggccgaacccagggctggaacctgggctccggggtcaaccgcgccagtgtcagcgccttcgccacgaccaataggatggagctcgagggcgcgagttactaggtgcccccgcagccgaacggcatgaccaacaacctccagggcagcaacacctatgccctggagaacactatgatcttcaacagccagccggcgaacccgggcaccaccgccacgtacctcgagggcaacatgctcatcaccagcgagagcgagacgcagccggtgaaccgcgtggcgtacaacgtcggcgggcagatggccaccaacaaccagagctccaccactgcccccgcgaccggcacgtacaacctccaggaaatcgtgcccggcagcgtgtggatggagggggacgtgtacctccaaggacccatctgggccaagatcccagagacgggggcgcactttcacccctctccggccatgggcggattcggactcaagcacccaccgcccatgatgctcatcaagaacacgcctgtgcccggaaatatcaccagcttctcggacgtgcccgtcagcagcttcatcacccagtacagcaccgggcaggtcaccgtggagatggagtgggagctcaagaaggaaaactccaagaggtggaacccagagatccagtacacaaacaactacaacgacccccagtttgtggactttgccccggacagcaccggggaatacagaaccaccagacctatcggaacccgataccttacccgacccctttaa

SEQ ID NO: 803 - DNA, 2175 bp, Artificial Sequence
  source: /note="Description of Artificial Sequence: Synthetic polynucleotide"
atgtcttttgttgatcaccctccagattggttggaagaagttggtgaaggtcttcgcgagtttttgggccttgaagcgggcccaccgaaaccaaaacccaatcagcagcatcaagatcaagcccgtggtcttgtgctgcctggttataactatctcggacccggaaacggtctcgatcgaggagagcctgtcaacagggcagacgaggtcgcgcgagagcacgacatctcgtacaacgagcagcttgaggcgggagacaacccctacctcaagtacaaccacgcggacgccgagtttcaggagaagctcgccgacgacacatccttcgggggaaacctcggaaaggcagtctttcaggccaagaaaagggttctcgaaccttttggcctggttgaagagggtgctaagacggcccctaccggaaagcggatagacgaccactttccaaaaagaaagaaggtccggaccgaagaggactccaagccttccacctcgtcagacgccgaagctggacccagcggatcccagcagctgcaaatcccagcccaaccagcctcaagtttgggagctgatacaatgtctgcgggaggtggcggcccattgggcgacaataaccaaggtgccgatggagtgggcaatgcctcgggagattggcattgcgattccacgtggatgggggacagagtcgtcaccaagtccacccgaacctgggtgctgcccagctacaacaaccaccagtaccgagagatcaaaagcggctccgtcgacggaagcaacgccaacgcctactttggatacagcaccccctgggggtactttgactttaaccgcttccacagccactggagcccccgagactggcaaagactcatcaacaactactggggcttcagaccccggtccctcagagtcaaaatcttcaacattcaagtcaaagaggtcacggtgcaggactccaccaccaccatcgccaacaacctcacctccaccgtccaagtgtttacggacgacgactaccagctgccctacgtcgtcggcaacgggaccgagggatgcctgccggccttccctccgcaggtctttacgctgccgcagtacggttacgcgacgctgaaccgcgacaacacagaaaatcccaccgagaggagcagcttcttctgcctagagtactttcccagcaagatgctgagaacgggcaacaactttgagtttacctacaactttgaggaggtgcccttccactccagcttcgctcccagtcagaacctcttcaagctggccaacccgctggtggaccagtacttgtaccgcttcgtgagcacaaataacactggcggagtccagttcaacaagaacctggccgggagatacgccaacacctacaaaaactggttcccggggcccatgggccgaacccagggctggaacctgggctccggggtcaaccgcgccagtgtcagcgccttcgccacgaccaataggatggagctcgagggcgcgagttaccaggtgcccccgcagccgaacggcatgaccaacaacctccagggcagcaacacctatgccctggagaacactatgatcttcaacagccagccggcgaacccgggcaccaccgccacgtacctcgagggcaacatgctcatcaccagcgagagcgagacgcagccggtgaaccgcgtggcgtacaacgtcggcgggcagatggccaccaacaaccagagctccaccactgcccccgcgaccggcacgtacaacctccaggaaatcgtgcccggcagcgtgtggatggagagggacgtgtacctccaaggacccatctgggccaagatcccagagacgggggcgcactttcacccctctccggccatgggcggattcggactcaaacacccaccgcccatgatgctcatcaagaacacgcctgtgcccggaaatatcaccagcttctcggacgtgcccgtcagcagcttcatcacccagtacagcaccgggcaggtcaccgtggagatggagtgggagctcaagaaggaaaactccgagaggtggaacccagagatccagtacacaaacaactacaacgacccccagtttgtggactttgccccggacagcaccggggaatacagaaccaccagacctattggaacccgataccttacccgacccctttaa

SEQ ID NO: 804 - DNA, 2175 bp, Artificial Sequence
  source: /note="Description of Artificial Sequence: Synthetic polynucleotide"
atgtcttttgttgatcaccctccagattggttggaagaagttggtgaaggtcttcgcgagtttttgggccttgaagcgggcccaccgaaaccaaaacccaatcagcagcatcaagatcaagcccgtggtcttgtgctgcctggttataactatctcggacccggaaacggtctcgatcgaggagagcctgtcaacagggcagacgaggtcgcgcgagagcacgacatctcgtacagcgagcagcttgaggcgggagacaacccctacctcaagtacaaccacgcggacgccgagtttcaggagaagctcgccgacgacacatccttcgggggaaacctcggaaaggcagtctttcaggccaagaaaagggttctcgaaccttttggcctggttgaagagggtgctaagacggcccctaccggaaagcggatagacgaccactttccaaaaagaaagaaggcccggaccgaagaggactccaagccttccacctcgtcagacgccgaagctggacccagcggatcccagcagctgcaaatcccagcccaaccagcctcaagtttgggagctgatacaatgtctgcgggaggtggcggcccattgggcgacaataaccaaggtgccgatggagtgggcaatgcctcgggagattggcattgcgattccacgtggatgggggacagagtcgtcaccaagtccacccgaacctgggtgctgcccagctacaacaaccaccagtaccgagagatcaaaagcggctccgtcgacggaagcaacgccaacgcctactttggatacagcaccccctgggggtactttgactttaaccgcttccacagccactggagcccccgagactggcaaagactcatcaacaactactggggcttcagaccccggtccctcagagtcaaaatcttcaacattcaagtcaaagaggtcacggtgcaggactccaccaccaccatcgccaacaacctcacctccaccgtccaagtgtttacggacgacgactaccagctgccctacgtcgtcggcaacgggaccgagggatgcctgccggccttccctccgcaggtctttacgctgccgcagtacggttacgcgacgctgaaccgcgacaacacagaaaatcccaccgagaggagcagcttcttctgcctagagtactttcccagcaagatgctgagaacgggcaacaactttgagtttacctacaactttgaggaggtgcccttccactccagcttcgctcccagtcagaacctcttcaagctggccaacccgctggtggaccagtacttgtaccgcttcgtgagcacaaataacactggcggagtccagttcaacaagaacctggccgggagatacgccaacacctacaaaaactggttcccggggcccatgggccgaacccagggctggaacctgggctccggggtcaaccgcgccagtgtcagcgccttcgccacgaccaataggatggagctcgagggcgcgagttaccaggtgcccccgcagccgaacggcatgaccaacaacctccagggcagcaacacctatgccctggagaacactatgatcttcaacagccagccggcgaacccgggcaccaccgccacgtacctcgagggcaacatgctcatcaccagcgagagcgagacgcagccggtgaaccgcgtggcgtacaacgtcggcgggcagatggccaccaacaaccagagctccaccactgcccccgcgaccggcacgtacaacctccaggaaatcgtgcccggcagcgtgtggatggagagggacgtgtacctccaaggacccatctgggccaagatcccagagacgggggcgcactttcacccctctccggccatgggcggattcggactcaaacacccaccgcccatgatgctcatcaagaacacgcctgtgcccggaaatatcaccagcttctcggacgtgcccgtcagcagcttcatcacccagtacagcaccgggcaggtcaccgtggagatggagtgggagctcaagaaggaaaactccaagaggtggaacccagagatccagtacacaaacaactacaacgacccccagtttgtggactttgccccggacagcaccggggaatacagaaccgccagacctatcggaacccgataccttacccgacccctttaa

SEQ ID NO: 805 - DNA, 2175 bp, Artificial Sequence
  source: /note="Description of Artificial Sequence: Synthetic polynucleotide"
atgtcttttgttgatcaccctccagattggttggaagaagttggtgaaggtcttcgcgagtttttgggccctgaagcgggcccaccgaaaccaaaacccaatcagcagcatcaagatcaagcccgtggtcttgtgctgcctggttataactatctcggacccggaaacggtctcgatcgaggagagcctgtcaacagggcagacgaggtcgcgcgagagcacgacatctcgtacaacgagcagcttgaggcgggagacaacccctacctcaagtacaaccacgcggacgccgagtttcaggagaagctcgccgacgacacatccttcgggggaaacctcggaaaggcagtctttcaggccaagaaaagggttctcgaaccttttggcctggttgaagagggtgctaagacggcccctaccggaaagcggatagacgaccactttccaaaaagaaagaaggcccggaccgaagaggactccaagccttccacctcgtcagacgccgaagctggacccagcggatcccagcagctgcaaatcccagcccaaccagcctcaagtttgggagctgatacaatgtctgcgggaggtggcggcccattgggcgacaataaccaaggtgccgatggagtgggcaatgcctcgggagattggcattgcgattccacgtggatgggggacagagtcgtcaccaagtccacccgaacctgggtgctgcccagctacaacaaccaccagtaccgagagatcaaaagcggctccgtcgacggaagcaacgccaacgcctactttggatacagcaccccctgggggtactttgactttaaccgcttccacagccactggagcccccgagactggcaaagactcatcaacaactactggggcttcagaccccggtccctcagagtcaaaatcttcaacattcaagtcaaagaggtcacggtgcaggactccaccaccaccatcgccaacaacctcacctccaccgtccaagtgtttacggacgacgactaccagctgccctacgtcgtcggcaacgggaccgagggatgcctgccggccttccctccgcaggtctttacgctgccgcagtacggttacgcgacgctgaaccgcgacaacacagaaaatcccaccgagaggagcagcttcttctgcctagagtactttcccagcaagatgctgagaacgggcaacaactttgagtttacctacaactttgaggaggtgcccttccactccagcttcgctcccagtcagaacctcttcaagctggccaacccgctggtggaccagtacttgtaccgcttcgtgagcacaaataacactggcggagtccagttcaacaagaacctggccgggagatacgccaacacctacaaaaactggttcccggggcccatgggccgaacccagggctggaacctgggctccggggtcaaccgcgccagtgtcagcgccttcgccacgaccaataggatggagctcgagggcgcgagttaccaggtgcccccgcagccgaacggcatgaccaacaacctccagggcagcaacacctatgccctggagaacactatgatcttcaacagccagccggcgaacccgggcaccaccgccacgtacctcgagggcaacatgctcatcaccagcgagagcgagacgcagccggtgaaccgcgtggcgtacaacgtcggcgggcagatgaccaccaacaaccagagctccaccactgcccccgcgaccggcacgtacaacctccaggaaatcgtgcccggcagcgtgtggatggagagggacgtgtacccccaaggacccatctgggccaagatcccagagacgggggcgcactttcacccctctccggccatgggcggattcggactcaaacacccaccgcccatgatgctcatcaagaacacgcctgtgcccggaaatatcaccagcttctcggacgtgcccgtcagcagcttcatcacccagtacagcaccgggcaggtcaccgtggagatggagtgggagctcaagaaggaaaactccaagaggtggaacccagagatccagtacacaaacaactacaacgacccccagtttgtggactttgccccggacagcaccggggaatacaggaccaccagacctatcggaacccgataccttacccgacccctttaa

SEQ ID NO: 806 - DNA, 2175 bp, Artificial Sequence
  source: /note="Description of Artificial Sequence: Synthetic polynucleotide"
atgtcttttgttgatcaccctccagattggttggaagaagttggtgaaggtcttcgcgagtttttgggccttgaagcgggcccaccgaaaccaaaacccaatcagcagcatcaagatcaagcccgtggtcttgtgctgcctggttataactatctcggacccggaaacggtctcgatcgaggagagcctgtcaacagggcagacgaggtcgcgcgagagcacgacatctcgtacaacgagcagcttgaggcgggagacaacccctacctcaagtacaaccacgcggacgccgagtttcaggagaagctcgccgacgacacatccttcgggggaaacctcggaaaggcagtctttcaggccaagaaaagggttctcgaaccttttggcctggttgaagagggtgctaagacggcccctaccggaaagcggatagacgaccactttccaaaaagaaagaaggcccggaccgaagaggactccaagccttccacctcgtcagacgccgaagctggacccagcggatcccagcagctgcaaatcccagcccaaccagcctcaagtttgggagctgatacaatgtctgcgggaggtggcggcccattgggcgacaataaccaaggtgccgatggagtgggcaatgcctcgggagattggcattgcgattccacgtggatgggggacagagtcgtcaccaagtccacccgaacctgggtgctgcccagctacaacaaccaccagtaccgagagatcaaaagcggctccgtcgacggaagcaacgccaacgcctactttggatacagcaccccctgggggtactttgactttaaccgcttccacagccactggagcccccgagactggcaaagactcatcaacaactactggggcttcagaccccggtccctcagagtcaaaatcttcaacattcaagtcaaagaggtcacggtgcaggactccaccaccaccatcgccaacaacctcacctccaccgtccaagtgtttacggacgacgactaccagctgccctacgtcgtcggcaacgggaccgagggatgcctgccggccttccctccgcaggtctttacgctgccgcagtacggttacgcgacgctgaaccgcgacaacacagaaaatcccaccgagaggagcagcttcctctgcctagagtactttcccagcaagatgctgagaacgggcaacaactttgagtttacctacaactttgaggaggtgcccttccactccagcttcgctcccagtcagaacctcttcaagctggccaacccgctggtggaccagtacttgtaccgcttcgtgagcacaaataacactggcggagtccagttcaacaagaacctggccgggagatacgccaacacctacaaaaactggttcccggggcccatgggccgaacccagggctggaacctgggctccggggtcaaccgcgccagtgtcagcgccttcgccacgaccaataggatggagctcgagggcgcgagttaccaggtgcccccgcagccgaacggcatgaccaacaacctccagggcagcaacacctatgccctggagaacactatgatcttcaacagccagccggcgaacccgggcaccaccgccacgtacctcgagggcaacatgctcatcaccagcgagagcgagacgcagccggtgaaccgcgtggcgtacaacgtcggcgggcagatggccaccaacaaccagagctccaccactgcccccgcgaccggcacgtacaacctccaggaaatcgtgcccggcagcgtgtggatgaagagggacgtgtacctccaaggacccatctgggccaagatcccagagacgggggcgcactttcacccctctccggccatgggcggattcggactcaaacacccaccgcccatgatgctcatcaagaacacgcctgtgcccggaaatatcaccagcttctcggacgtgcccgtcagcagcttcatcacccagtacagcaccgggcaggtcaccgtggagatggagtgggagctcaagaaggaaaactccaagaggtggaacccagagatccagtacacaaacaactacaacgacccccagtttgtggactttgccccggacagcaccggggaatacagaaccaccagacctatcggaacccgataccttacccgacccctttaa

SEQ ID NO: 807 - DNA, 2175 bp, Artificial Sequence
  source: /note="Description of Artificial Sequence: Synthetic polynucleotide"
atgtcttttgttgatcaccctccagattggttggaagaagttggtgaaggtcttcgcgagtttttgggccttgaggcgggcccaccgaaaccaaaacccaatcagcagcatcaagatcaagcccgtggtcttgtgctgcctggttataactatctcggacccggaaacggtctcgatcgaggagagcctgtcaacagggcagacgaggtcgcgcgagagcacgacatctcgtacaacgagcagcttgaggcgggagacaacccctacctcaagtacaaccacgcggacgccgagtttcaggagaagctcgccgacgacacatccttcgggggaaacctcggaaaggcagtctttcaggccaagaaaagggttctcgaaccttttggcctggttgaagagggtgctaagacggcccctaccggaaagcggatagacgaccactttccaaaaagaaagaaggcccggaccgaagaggactccaagccttccaccccgtcagacgccgaagctggacccagcggatcccagcagctgcaaatcccagcccaaccagcctcaagtttgggagctgatacaatgtctgcgggaggtggcggcccattgggcgacaataaccaaggtgccgatggagtgggcaatgcctcgggagattggcattgcgattccacgtggatgggggacagagtcgtcaccaagtccacccgaacctgggtgctgcccagctacaacaaccaccagtaccgagagatcaaaagcggctccgtcgacggaagcaacgccaacgcctactttggatacagcaccccctgggggtactttgactttaaccgcttccacagccactggagcccccgagactggcaaagactcatcaacaactactggggcttcagaccccggtccctcagagtcaaaatcttcaacattcaagtcaaagaggtcacggtgcaggactccaccaccaccatcgccaacaacctcacctccaccgtccaagtgtttacggacgacgactaccagctgccctacgtcgtcggcaacgggaccgagggatgcctgccggccttccctccgcaggtctttacgctgccgcagtacggttacgcgacgctgaaccgcgacaacacagaaaatcccaccgagaggagcagcttcttctgcctagagtactttcccagcaagatgctgagaacgggcaacaactttgagtttacctacaactttgaggaggtgcccttccactccagcttcgctcccagtcagaacctcttcaagctggccaacccgctggtggaccagtacttgtaccgcttcgtgagcacaaataacactggcggagtccagttcaacaagaacctggccgggagatacgccaacacctacaaaaactggttcccggggcccatgggccgaacccagggctggaacctgggctccggggtcaaccgcgccagtgtcagcgccttcgccacgaccaataggatggagctcgagggcgcgagttaccaggtgcccccgcagccgaacggcatgaccaacaacctccagggcagcaacacctatgccctggagaacactatgatcttcaacagccagccggcgaacccgggcaccaccgccacgtacctcgagggcaacatgctcatcaccagcgagagcgagacgcagccggtgaaccgcgtggcgtacaacgtcggcgggcagatggccaccaacaaccagagctccaccactgcccccgcgaccggcacgtacaacctccaggaaatcgtgcccggcagcgtgtggatggagagggacgtgtacctccaaggacccatctgggccaagatcccagagacgggggcgcactttcacccctctccggccatgggcggattcggactcaaacacccaccgcccatgatgctcatcaagaacacgcctgtgcccggaaatatcaccagcttctcggacgtgcccgtcagcagcttcatcacccagtacagcaccgggcaggtcaccgtggagatggagtgggagctcaagaaggaaaactccaagaggtggaacccagagatccagtacacaaacaactacaacgacccccagtttgtggactttgccccggacagcaccggggaatacagaaccaccagacctatcggaacccgataccttacccgacccctttaa

SEQ ID NO: 808 - DNA, 2175 bp, Artificial Sequence
  source: /note="Description of Artificial Sequence: Synthetic polynucleotide"
atgtcttttgttgatcaccctccagattggttggaagaagttggtgaaggtcttcgcgagtttttgggccttgaagcgggcccaccgaaaccaaaacccaatcagcagcatcaagatcaagcccgtggtcttgtgctgcctggttataactatctcggacccggaaacggtctcgatcgaggagagcctgtcaacagggcagacgaggtcgcgcgagagcacgacatctcgtacaacgagcagcttgaggcgggagacaacccctacctcaagtacaaccacgcggacgccgagtttcaggagaagctcgccgacgacacatccttcgggggaaacctcggaaaggcagtctttcaggccaagaaaagggttctcgaaccttttggcctggttgaagagggtgctaagacggcccctaccggaaagcggatagacgaccactttccaaaaagaaagaaggcccggaccgaagaggactccaagccttccacctcgtcagacgccgaagctggacccagcggatcccagcagctgcaaatcccagcccaaccagcctcaagtttgggagctgatacaatgtctgcgggaggtggcggcccattgggcgacaataaccaaggtgccgatggagtgggcaatgcctcgggagattggcattgcgattccacgtggatgggggacagagtcgtcaccaagtccacccgaacctgggtgctgcccagctacaacaaccaccagtaccgagagatcaaaagcggctccgtcgacggaagcaacgccaacgcctactttggatacagcaccccctgggggtactttgactttaaccgcttccacagccactggagcccccgagactggcaaagactcatcaacaactactggggcttcagaccccggtccctcagagtcaaaatcttcaacattcaagtcaaagaggtcacggtgcaggactccaccaccaccatcgccaacaacctcacctccaccgtccaagtgtttacggacgacgactaccagctgccctacgtcgtcggcaacgggaccgagggatgcctgccggccttccctccgcaggtctttacgctgccgcagtacggttacgcgacgctgaaccgcgacaacacagaaaatcccaccgagaggagcagcttcttctgcctagagtactttcccagcaagatgctgagaacgggcaacaactttgagtttacctacaactttgaggaggtgcccttccactccagcttcgctcccagtcagaacctcttcaagctggccaacccgctggtggaccagtacttgtaccgcttcgtgagcacaaataacactggcggagtccagttcaacaagaacctggccgggagatacgccaacacccacaaaaactggttcccggggcccatgggccgaacccagggctggaacctgggctccggggtcaaccgcgccagtgtcagcgccttcgccacgaccaataggatggagctcgagggcgcgagttaccaggtgcccccgcagtcgaacggcatgaccaacaacctccggggcagcaacacctatgccctggagaacactatgatcttcaacagccagccggcgaacccgggcaccaccgccacgtacctcgagggcaacatgctcatcaccagcgagagcgagacgcagccggtgaaccgcgtggcgtacaacgtcggcgggcagatggccaccaacaaccagagctccaccactgcccccgcgaccggcacgtacaacctccaggaaatcgtgcccggcagcgtgtggatggagagggacgtgtacctccaaggacccatctgggccaagatcccagagacgggggcgcactttcacccctctccggccatgggcggattcggactcaaacacccaccgcccatgatgctcatcaagaacacgcctgtgcccggaaatatcaccagcttctcggacgtgcccgtcagcagcttcatcacccagtacagcaccgggcaggtcaccgtggagatggagtgggagctcaagaaggaaaactccaagaggtggaacccagagatccagtacacaaacaactacaacgacccccagtttgtggactttgccccggacagcaccggggaatacagaaccaccagacctatcggaacccgataccttacccgacccctttaa

SEQ ID NO: 809 - DNA, 2175 bp, Artificial Sequence
  source: /note="Description of Artificial Sequence: Synthetic polynucleotide"
atgtcttttgttgatcaccctccagattggttggaagaagttggtgaaggtcttcgcgagtttttgggccttgaagcgggcccaccgaaaccaaaacccaatcagcagcatcaagatcaagcccgtggtcttgtgctgcctggttataactatctcggacccggaaacggtctcgatcgaggagagcctgtcaacagggcagacgaggtcgcgcgagagcacgacatctcgtacaacgagcagcttgaggcgggagacaacccctacctcaagtacaaccacgcggacgccgagtttcaggagaagctcgccgacgacacatccttcgggggaaacctcggaaaggcagtctttcaggccaagaaaagggttctcgaaccttttggcctggttgaagagggtgctaagacggcccctaccggaaagcggatagacgaccactttccaaaaagaaagaaggcccggaccgaagaggactccaagccttccacctcgtcagacgccgaagctggacccagcggatcccagcagctgcaaatcccagcccaaccagcctcaagtttgggagctgatacaatgtctgcgggaggtggcggcccattgggcgacaataaccaaggtgccgatggagtgggcaatgcctcgggagattggcattgcgattccacgtggatgggggacagagtcgtcaccaagtccacccgaacctgggtgctgcccagctacaacaaccaccagtaccgagagatcaaaagcggctccgtcgacggaagcaacgccaacgcctactttggatacagcaccccctgggggtactttgactttaaccgcttccacagccactggagcccccgagactggcaaagactcatcaacaactactggggcttcagaccccggtccctcagagtcaaaatcttcaacattcaagtcaaagaggtcacggtgcaggactccaccaccaccatcgccaacaacctcacctccaccgtccaagtgtttacggacgacgactaccagctgccctacgtcgtcggcaacgggaccgagggatgcctgccggccttccctccgcaggtctttacgctgccgcagtacggttacgcgacgctgaaccgcgacaacacagaaaatcccaccgagaggagcagcttcttctgcctagagtactttcccagcaagatgctgagaacgggcaacaactttgagtttacctacaactttgaggaggtgcccttccactccagcttcgctcccagtcagaacctcttcaagctggccaacccgctggtggaccagtacttgtaccgcttcgtgagcacaaataacactggcggagtccagttcaacaagaacctggccgggagatacgccaacacctacaaaaactggttcccggggcccatgggccgaacccagggctggaacctgggctccggggtcaaccgcgccagtgtcagcgccttcgccacgaccaataggatggagctcgagggcgcgagttaccaggtgcccccgcagccgaacggcatgaccaacaacctccagggcagcaacacctatgccctggagaacactatgatcttcaacagccagccggcgaacccgggcaccaccgccacgtacctcgagggcaacatgctcatcaccagcgagagcgagacgcagccggtgaaccgcgtggcgtacagcgtcggcgggcagatggccaccaacaaccagagctccaccactgcccccacgaccggcacgtacaacctccaggaaatcgtgcccggcagcgtgtggatggagagggacgtgtacctccaaggacccatctgggccaagatcccagagacgggggcgcactttcacccctctccggccatgggcggattcagactcaaacacccaccgcccatgatgctcatcaagaacacgcctgtgcccggaaatatcaccagcttctcggacgtgcccgtcagcagcttcatcacccagtacagcaccgggcaggtcaccgtggagatggagtgggagctcaagaaggaaaactccaagaggtggaacccagagatccagtacacaaacaactacaacgacccccagtttgtggactttgccccggacagcaccggggaatacagaaccaccagacctatcggaacccgataccttacccgacccctttaa

SEQ ID NO: 810 - DNA, 2175 bp, Artificial Sequence
  source: /note="Description of Artificial Sequence: Synthetic polynucleotide"
atgtcttttgttgatcaccctccagattggttggaagaagttggtgaaggtcttcgcgagtttttgggccttgaagcgggcccaccgaaaccaaaacccaatcagcagcatcaagatcaagcccgtggtcttgtgctgcctggttataactatctcggacccggaaacggtctcgatcgaggagagcctgtcaacagggcagacgaggtcgcgcgagagcacgacatctcgtacaacgagcagcttgaggcgggagacaacccctacctcaagtacaaccacgcggacgccgagtttcaggagaagctcgccgacgacacatccttcgggggaaacctcggaaaggcagtctttcaggccaagaaaagggttctcgaaccttttggcctggttgaagagggtgctaagacggcccctaccggaaagcggatagacgaccactttccaaaaagaaagaaggcccggaccgaagaggactccaagccttccacctcgtcagacgccgaagctggacccagcggatcccagcagctgcaaatcccagcccaaccagcctcaagtttgggagctgatacaatgtctgcgggaggtggcggcccattgggcgacaataaccaaggtgccgatggagtgggcaatgcctcgggagattggcattgcgattccacgtggatgggggacagagtcgtcaccaagtccacccgaacctgggtgctgcccagctacaacaaccaccagtaccgagagatcaaaagcggctccgtcgacggaagcaacgccaacgcctactttggatacagcaccccctgggggtactttgactttaaccgcttccacagccactggagcccccgagactggcaaagactcatcaacaactactggggcttcagaccccggtccctcagagtcaaaatcttcaacattcaagtcaaagaggtcacggtgcaggactccaccaccaccatcgccaacaacctcacctccaccgtccaagtgtttacggacgacgactaccagctgccctacgtcgtcggcaacgggaccgagggatgcctgccggccttccctccgcaggtctttacgctgccgcagtacggttacgcgacgctgaaccgcgacaacacagaaaatcccaccgagaggagcagcttcttctgcctagagtactttcccagcaagatgctgagaacgggcaacaactttgagtttacctacaactttgaggaggtgcccttccactccagcttcgctcccagtcagaacctcttcaagctggccaacccgctggtggaccagtacttgtaccgcttcgtgagcacaaataacactggcggagtccagttcaacaagaacctggccgggagatacgccaacacctacaaaaactggttcccggggcccatgggccgaacccagggctggaacctgggctccggggtcaaccgcgccagtgtcagcgccttcgccgcgaccaataggatggagctcgagggcgcgagttaccaggtgcccccgcagccgaacggcatgaccaacaacctccagggcagcaacacctatgccctggagaacactatgatcttcaacagccagccggcgaacccgggcaccaccgccacgtacctcgagggcaacatgctcatcaccagcgagagcgagacgcagccggtgaaccgcgtggcgtacaacgtcggcgggcagatggccaccaacaaccagagctccaccactgcccccgcgaccggcacgtacaacctccaggaaatcgtgcccggcggcgtgtggatggagagggacgtgtacctccaaggacccatctgggccaagatcccagagacgggggcgcactttcacccctctccggccatgggcggattcggactcaaacacccaccgcccatgatgctcatcaagaacacgcctgtgcccggaaataccaccagcttctcggacgtgcccgtcagcagcttcatcacccagtacagcaccgggcaggtcaccgtggagatggagtgggagctcaagaaggaaaactccaagaggtggaacccagagatccagtacacaaacaactacaacgacccccagtttgtggactttgccccggacagcaccggggaatacagaaccaccagacctatcggaacccgataccttacccgacccctttaa

SEQ ID NO: 811 - DNA, 2175 bp, Artificial Sequence
  source: /note="Description of Artificial Sequence: Synthetic polynucleotide"
atgtcttttgttgatcaccctccagattggttggaagaagttggtgaaggtcttcgcgagtttttgggccttgaagcgggcccaccgaaaccaaaacccaatcagcagcatcaagatcaagcccgtggtcttgtgctgcctggttataactatctcggacccggaaacggtctcgatcgaggagagcctgtcaacagggcagacgaggtcgcgcgagagcacgacatctcgtacaacgagcagcttgaggcgggagacaacccctacctcaagtacaaccacgcggacgccgagtttcaggagaagctcgccgacgacacatccttcgggggaaacctcggaaaggtagtctttcaggccaagaaaagggttctcgaaccttttggcctggttgaagagggtgctaagacggcccctaccggaaagcggatagacgaccactttccaaaaagaaagaaggcccggaccgaagaggactccaagccttccacctcgtcagacgccgaagctggacccagcggatcccagcagctgcaaatcccagcccaaccagcctcaagtttgggagctgatacaatgtctgcgggaggtggcggcccattgggcggcaataaccaaggtgccgatggagtgggcaatgcctcgggagattggcattgcgattccacgtggatgggggacagagtcgtcaccaagtccacccgaacctgggtgctgcccagctacaacaaccaccagtaccgagagatcaaaagcggctccgtcgacggaagcaacgccaacgcctactttggatacagcaccccctgggggtactttgactttaaccgcttccacagccactggggcccccgagactggcaaagactcatcaacaactactggggcttcagaccccggtccctcagagtcaaaatcttcaacattcaagtcaaagaggtcacggtgcaggactccaccaccaccatcgccaacaacctcacctccaccgtccaagtgtttacggacgacgactaccagctgccctacgtcgtcggcaacgggaccgagggatgcctgccggccttccctccgcaggtctttacgctgccgcagtacggttacgcgacgctgaaccgcgacaacacagaaaatcccaccgagaggagcagcttcttctgcctagagtactttcccagcaagatgctgagaacgggcaacaactttgagtttacctacaactttgaggaggtgcccttccactccagcttcgctcccagtcagaacctcttcaagctggccaacccgctggtggaccagtacttgtaccgcttcgtgagcacaaataacactggcggagtccagttcaacaagaacctggccgggagatacgccaacacctacaaaaactggttcccggggcccatgggccgaacccagggctggaacctgggctccggggtcaaccgcgccagtgtcagcgccctcgccacgaccaataggatggagctcgagggcgcgagttaccaggtgcccccgcagccgaacggcatgaccaacaacctccagggcagcaacacctatgccctggagaacactatgatcttcaacagccagccggcgaacccgggcaccaccgccacgtacctcgagggcaacatgctcatcaccagcgagagcgagacgcagccggtgaaccgcgtggcgtacaacgtcggcgggcagatggccaccaacaaccagagctccaccactgcccccgcgaccggcacgtacaacctccaggaaatcgtgcccggcagcgtgtggatggagagggacgtgtacctccaaggacccatctgggccaagatcccagagacgggggcgcactttcacccctctccggccatgggcggattcggactcaaacacccaccgcccatgatgctcatcaagaacacgcctgtgcccggaaatatcaccagcttctcggacgtgcccgtcagcagcttcatcacccagtacagcaccgggcaggtcaccgtggagatggagtgggagctcaagaaggaaaactccaagaggtggaacccagagatccagtacacaaacaactacaacgacccccagtttgtggactttgccccggacagcaccggggaatacagaaccaccagacctatcggaacccgataccttacccgacccctttaa

SEQ ID NO: 812 - DNA, 2175 bp, Artificial Sequence
  source: /note="Description of Artificial Sequence: Synthetic polynucleotide"
atgtcttttgttgatcaccctccagattggttggaagaagttggtgaaggtcttcgcgagtttttgggccttgaagcgggcccaccgaaaccaaaacccaatcagcagcatcaagatcaagcccgtggtcttgtgctgcctggttataactatctcggacccggaaacggtctcgatcgaggagagcctgtcaacagggcagacgaggtcgcgcgagagcacgacatctcgtacaacgagcagcttgaggcgggagacaacccctacctcaagtacaaccacgcggacgccgagtttcaggagaagctcgccgacgacacatccttcgggggaaacctcggaaaggcagtctttcaggccaagaaaagggttctcgaaccttttggcctggttgaagagggtgctaagacggcccctaccggaaagcggatagacgaccactttccaaaaagaaagaaggcccggaccgaagaggactccaagccttccacctcgtcagacgccgaagctggacccagcggatcccagcagctgcaaatcccagcccaaccagcctcaagtttgggagctgatacaatgtctgcgggaggtggcggcccattgggcgacaataaccaaggtgccgatggagtgggcaatgcctcgggagattggcattgcgattccacgtggatgggggacagagtcgtcaccaagtccacccgaacctgggtgctgcccagctacaacaaccaccagtaccgagagatcaaaagcggctccgtcgacggaagcaacgccaacgcctactttggatacagcaccccctgggggtactttgactttaaccgcttccacagccactggagcccccgagactggcaaagactcatcaacaactactggggcttcagaccccggtccctcagagtcaaaatcttcaacattcaagtcaaagaggtcacggtgcaggactccaccaccaccatcgccaacaacctcacctccaccgtccaagtgtttacggacgacgactaccagctgccctacgtcgtcggcaacgggaccgagggatgcctgccggccttccctccgcaggtctttacgctgccgcagtacggttacgcgacgctgaaccgcgacaacacagaaaatcccaccgagaggagcagcttcttctgcctagagtactttcccagcaagatgctgagaacgggcaacaactttgagtttacctacaactttgaggaggtgcccttccactccagcttcgctcccagtcagaacctcttcaagctggccaacccgctggtggaccagtacttgtaccgcttcgtgagcacaaataacactggcggagtccagttcaacaagaacctggccgggagatacgccaacacctacaaaaactggttcccggggcccatgggccgaacccagggctggaacctgggctccggggtcaaccgcgccagtgtcagcgccttcgccacgaccaataggatggagctcgagggcgcgagttaccaggtgcccccgcagccgaacggcatgaccaacaacctccagggcagcaacacctatgccctggagaacactatgatcttcaacagccagccggcgaacccgggcaccaccgccacgtacctcgagggcaacatgctcatcaccagcgagagcgagacgcagccggtgaaccgcgtggcgtacaacgtcggcgggcagatggccaccaacaaccagagctccaccactgcccccgcgaccggcacgtacaacctccaggaaatcgtgcccggcagcgtgtggatggagagggacgtgtacctccaaggacccatctgagccaagatcccagagacgggggcgcactttcacccctctccggccatgggcggattcggactcaaacacccaccgcccatgatgctcatcaagaacacgcctgtgcccggaaatatcaccagcttctcggacgtgcccgtcagcagcttcatcacccagtacagcaccgggcaggtcaccgtggagatggagtgggagctcaagaaggaaaactccaagaggtggaacccagagatccagtacacaaacaactacaacgacccccagtttgtggactttgccccggacagcaccggggaatgcagaaccaccagacctatcggaacccgataccttacccgacccctttaa

SEQ ID NO: 813 - DNA, 2175 bp, Artificial Sequence
  source: /note="Description of Artificial Sequence: Synthetic polynucleotide"
atgtcttttgttgatcaccctccagattggttggaagaagttggtgaaggtcttcgcgagtttttgggccttgaagcgggcccaccgaaaccaaaacccaatcagcagcatcaagatcaagcccgtggtcttgtgctgcctggttataactatctcggacccggaaacggtctcgatcgaggagagcctgtcaacagggcagacgaggtcgcgcgagagcacgacatctcgtacaacgagcagcttgaggcgggagacaacccctacctcaagtacaaccacgcggacgccgagtttcaggagaagctcgccgacgacacatccttcgggggaaacctcggaaaggcagtctttcaggccaagaaaagggttctcgaaccttttggcctggttgaagagggtgctaagacggcccctaccggaaagcggatagacgaccactttccaaaaagaaagaaggcccggaccgaagaggactccaagccttccacctcgtcagacgccgaagctggacccagcggatcccagcagctgcaaatcccagcccaaccagcctcaagtttgggagctgatacaatgtctgcgggaggtggcggcccattgggcgacaataaccaaggtgccgatggagtgggcaatgcctcgggagattggcattgcgattccacgtggatgggggacagagtcgtcaccaagtccacccgaacctgggtgctgcccagctacaacaaccaccagtaccgagagatcaaaagcggctccgtcgacggaagcaacgccaacgcctactttggatacagcaccccctgggggtactttgactttaaccgcttccacagccactggagcccccgagactggcaaagactcatcaacaactactggggcttcagaccccggtccctcagagtcaaaatcctcaacattcaagtcaaagaggtcacggtgcaggactccaccaccaccatcgccaacaacctcacctccaccgtccaagtgtttacggacgacgactaccagctgccctacgtcgtcggcaacgggaccgagggatgcctgccggccttccctccgcaggtctttacgctgccgcagtacggttacgcgacgctgaaccgcgacaacacagaaaatcccaccgagaggagcagcttcttctgcctagagtactttcccagcaagatgctgagaacgggcaacaactttgagtttacctacaactttgaggaggtgcccttccactccagcttcgctcccagtcagaacctcttcaagctggccaacccgctggtgggccagtacttgtaccgcttcgtgagcacaaataacactggcggagtccagttcaacgagaacctggccgggagatacgccaacacctacaaaaactggttcccggggcccatgggccgaacccagggctggaacctgggctccggggtcaaccgcgccagtgtcagcgccttcgccacgaccaataggatggagctcgagggcgcgagttaccaggtgcccccgcagccgaacggcatgaccaacaacctccagggcagcaacacctatgccctggagaacactatgatcttcaacagccagccggcgaacccgggcaccaccgccacgtacctcgagggcaacatgctcatcaccagcgagagcgagacgcagccggtgaaccgcgtggcgtacaacgtcggcgggcagatggccaccaacaaccagagctccaccactgcccccgcgaccggcacgtacaacctccaggaaatcgtgcccggcagcgtgtggatggagagggacgtgtacctccaaggacccatctgggccaagatcccagagacgggggcgcactttcacccctctccggccatgggcggattcggactcaaacacccaccgcccatgatgctcatcaagaacacgcctgtgcccggaaatatcaccagcttctcggacgtgcccgtcagcagcttcatcacccagtacagcaccgggcaggccaccgtggagatggagtgggagctcaagaaggaaaactccaagaggtggaacccagagatccagtacacaaacaactacaacgacccccagtttgtggactttgccccggacagcaccggggaatacagaaccaccagacctatcggaacccgataccttacccgacccctttaa

SEQ ID NO: 814 - DNA, 2175 bp, Artificial Sequence
  source: /note="Description of Artificial Sequence: Synthetic polynucleotide"
atgtcttttgttgatcaccctccagattggttggaagaagttggtgaaggtcttcgcgagtttttgggccttgaagcgggcccaccgaaaccaaaacccaatcagcagcatcaagatcaagcccgtggtcttgtgctgcctggttataactatctcggacccggaaacggcctcgatcgaggagagcctgtcaacagggcagacgaggtcgcgcgagagcacgacatctcgtacaacgagcagcttgaggcgggagacaacccctacctcaagtacaaccacgcggacgccgagtttcaggagaagctcgccgacgacacatccttcgggggaaacctcggaaaggcagtctttcaggccaagaaaagggttctcgaaccttttggcctggttgaagagggtgctaagacggcccctaccggaaagcggatagacgaccactttccaaaaagaaagaaggcccggaccgaagaggactccaagccttccacctcgtcagacgccgaagctggacccagcggatcccagcagctgcaaatcccagcccaaccagcctcaagtttgggagctgatacaatgtctgcgggaggtggcggcccattgggcgacaataaccaaggtgccgatggagtgggcaatgcctcgggagattggcattgcgattccacgtggatgggggacagagtcgtcaccaagtccacccgaacctgggtgctgcccagctacaacaaccaccagtaccgagagatcaaaagcggctccgtcgacggaagcaacgccaacgcctactttggatacagcaccccctgggggtactttgactttaaccgcttccacagccactggagcccccgagactggcaaagactcatcaacaactactggggcttcagaccccggtccctcagagtcaaaatcttcaacattcaagtcaaagaggtcacggtgcaggactccaccaccatcatcgccaacaacctcacctccaccgtccaagtgtttacggacgacgactaccagctgccctacgtcgtcggcaacgggaccgagggatgcctgccggccttccctccgcaggtctttacgctgccgcagtacggttacgcgacgctgaaccgcgacaacacagaaaatcccaccgagaggagcagcttcttctgcctagagtactttcccagcaagatgctgagaacgggcaacaactttgagtttacctacaactttgaggaggtgcccttccactccagcttcgcccccagtcagaacctcttcaagctggccaacccgctggtggaccagtacttgtaccgcttcgtgagcacaaataacactggcggagtccagttcaacaagaacctggccgggagatacgccaacacctacaaaaactggttcccggggcccatgggccgaacccagggctggaacctgggctccggggtcaaccgcgccagtgtcagcgccttcgccacgaccaataggatggagctcgagggcgcgagttaccaggtgcccccgcagccgaacggcatgaccaacaacctccagggcagcaacacctatgccctggagaacactatgatcttcaacagccagccggcgaacccgggcaccaccgccacgtacctcgagggcaacatgctcatcaccagcgagagcgagacgcagccggtgaaccgcgtggcgtacaacgtcggcgggcagatggccaccaacaaccagagctccaccactgcccccgcgaccggcacgtacaacctccaggaaatcgtgcccggcagcgtgtggatggagagggacgtgtacctccaaggacccatctgggccaagatcccagagacgggggcgcactttcacccctctccggccatgggcggattcggactcaaacacccaccgcccatgatgctcatcaagaacacgcctgtgcccggaaatatcaccagcttctcggacgtgcccgtcagcagcttcatcacccagtacagcaccgggcaggtcaccgtggagatggagtgggagctcaagaaggaaaactccaagaggtggaacccagagatccagtacacaaacaactacaacgacccccagtttgtggactttgccccggacagcaccggggaatacagaaccaccagacctatcggaacccgataccttacccgacccctttaa

SEQ ID NO: 815 - DNA, 2175 bp, Artificial Sequence
  source: /note="Description of Artificial Sequence: Synthetic polynucleotide"
atgtcttttgttgatcaccctccagattggttggaagaagttggtgaaggtcttcgcgagtttttgggccttgaagcgggcccaccgaaaccaaaacccaatcagcagcatcaagatcaagcccgtggtcttgtgctgcctggttataactatctcggacccggaaacggtctcgatcgaggagagcctgtcaacagggcagacgaggtcgcgcgagagcacgacatctcgtacaacgagcagcttgaggcgggagacaacccctacctcaagtacaaccacgcggacgccgagtttcaggagaagctcgccgacgacacatccttcgggggaaacctcggaaaggcagtctttcaggccaagaaaagggttctcgaaccttttggcctggttgaagagggtgctaagacggcccctaccggaaagcggatagacgaccactttccaaaaagaaagaaggcccggaccgaagaggactccaagccttccacctcgtcagacgccgaagctggacccagcggatcccagcagctgcaaatcccagcccaaccagcctcaagtttgggagctgatacaatgtctgcgggaggtggcggcccattgggcgacaataaccaaggtgccgatggagtgggcaatgcctcgggagattggcattgcgattccacgtggatgggggacagagtcgtcaccaagtccacccgaacctgggtgctgcccagctacaacaaccaccagtaccgagagatcaaaagcggctccgtcgacggaagcaacgccaacgcctactttggatacagcaccccctgggggtactttgactttaaccgcttccacagccactggagcccccgagactggcaaagactcatcaacaactactggggcttcagaccccggtccctcagagtcaaaatcttcaacattcaagtcaaagaggtcacggtgcaggactccaccaccaccatcgccaacaacctcacctccaccgtccaagtgtttacggacgacgactaccagctgccctacgtcgtcggcaacgggaccgagggatgcctgccggccttccctccgcaggtctttacgctgccgcagtacggttacgcgacgctgaaccgcgacaacacagaaaatcccaccgagaggagcagcttcttctgcctagagtactttcccagcaagatgctgagaacgggcaacaactttgagtttacctacaactttgaggaggtgcccttccactccagcttcgctcccagtcagaacctcttcaagctggccaacccgctggtggaccagtacttgtaccgcttcgtgagcacaaataacactggcggagtccagttcaacaagaacctggccgggagatacgccaacacctacaaaaactggttcccggggcccatgggccgaacccagggctggaacctgggctccggggtcaaccgcgccagtgtcagcgccttcgccacgaccaataggatggagctcgagggcgcgagttaccaggtgcccccgcagccgaacggcatgaccaacaacctccagggcagcaacacctatgccctggagaacactatgatcttcaacagccagccggcgaacccgggcaccaccgccacgtacctcgagggcaacatgctcatcaccagcgagagcgagacgcagccggtgaaccgcgtggcgtacaacgtcggcgggcagatggccaccaacaaccagagctccaccactgcccccgcgaccggcacgtacaacctccaggaaatcgtgcccggcagcgtgtggatggagagggacgtgtacctccaaggacccatctgggccaagatcccagagacgggggcgcactttcacccctctccggccatgggcggattcggactcaaacacccaccgcccatgatgctcatcaagaacacgcctgtgcccggaaatatcaccagcctctcggacgtgcccgtcagcagcttcatcacccagtacagcaccgggcaggtcaccgtggagatggagtgggagctcaagaaggaaaactccaagaggtggaacccagagatccagtacacaaacaactacaacgacccccagtttgtggactttgccccggacagcaccggggaatacagaaccaccagacctatcggaacccgataccttacccgacccctttaa

SEQ ID NO: 816 - DNA, 2175 bp, Artificial Sequence
  source: /note="Description of Artificial Sequence: Synthetic polynucleotide"
atgtcttttgttgatcaccctccagattggttggaagaagttggtgaaggtcttcgcgagtttttgggccttgaagcgggcccaccgaaaccaaaacccaatcagcagcatcaagatcaagcccgtggtcttgtgctgcctggttataactatctcggacccggaaacggtctcgatcgaggagagcctgccaacagggcagacgaggtcgcgcgagagcacgacatctcgtacaacgagcagcttgaggcgggagacaacccctacctcaagtacaaccacgcgggcgccgagtttcaggagaagctcgccgacgacacatccttcgggggaaacctcggaaaggcagtctttcaggccaagaaaagggttctcgaaccttttggcctggttgaagagggtgctaagacggcccctaccggaaagcggatagacgaccactttccaaaaagaaagaaggcccggaccgaagaggactccaagccttccacctcgtcagacgccgaagctggacccagcggatcccagcagctgcaaatcccagcccaaccagcctcaagtttgggagctgatacaatgtctgcgggaggtggcggcccattgggcgacaataaccaaggtgccgatggagtgggcaatgcctcgggagattggcattgcgattccacgtggatgggggacagagtcgtcaccaagtccacccgaacctgggtgctgcccggctacaacaaccaccagtaccgagagatcaaaagcggctccgtcgacggaagcaacgccaacgcctactttggatacagcaccccctgggggtactttgactttaaccgcttccacagccactggagcccccgagactggcaaagactcatcaacaactactggggcttcagaccccggtccctcagagtcaaaatcttcaacattcaagtcaaagaggtcacggtgcaggactccaccaccaccatcgccaacaacctcacctccaccgtccaagtgtttacggacgacgactaccagctgccctacgtcgtcggcaacgggaccgagggatgcctgccggccttccctccgcaggtctttacgctgccgcagtacggttacgcgacgctgaaccgcgacaacacagaaaatcccaccgagaggagcagcttcttctgcctagagtactttcccagcaagatgctgagaacgggcaacaactttgagtttacctacaactttgaggaggtgcccttccactccagcttcgctcccagtcagaacctcttcaagctggccaacccgctggtggaccagtacttgtaccgcttcgtgagcacaaataatactggcggagtccagttcaacaagaacctggccgggagatacgccaacacctacaaaaactggttcccggggcccatgggccgaacccagggctggaacctgggctccggggtcaaccgcgccagtgtcagcgccttcgccacgaccaataggatggagctcgagggcgcgagttaccaggtgcccccgcagccgaacggcatgaccaacaacctccagggcagcaacacctatgccctggagaacactatgatcttcaacagccagccggcgaacccgggcaccaccgccacgtacctcgagggcaacatgctcatcaccagcgagagcgagacgcagccggtgaaccgcgtggcgtacaacgtcggcgggcagatggccaccaacaaccagagctccaccactgcccccgcgaccggcacgtacaacctccaggaaatcgtgcccggcagcgtgtggatggagagggacgtgtacctccaaggacccatctgggccaagatcccagagacgggggcgcactttcacccctctccggccatgggcggattcggactcaaacacccaccgcccatgatgctcatcaagaacacgcctgtgcccggaaatatcaccagcttctcggacgtgcccgtcagcagcttcatcacccagtacagcaccgggcaggtcaccgtggagatggagtgggagctcaagaaggaaaactccaagaggtggaacccagagatccagtacacaaacaactacaacgacccccagtttgtggactttgccccggacagcaccggggaatacagaaccaccagacctatcggaacccgataccttacccgacccctttaa

SEQ ID NO: 817 - DNA, 2175 bp, Artificial Sequence
  source: /note="Description of Artificial Sequence: Synthetic polynucleotide"
atgtcttttgttgatcaccctccagattggttggaagaagttggtgaaggtcttcgcgagtttttgggccttgaagcgggcccaccgaaaccaaaacccaatcagcagcatcaagatcaagcccgtggtcttgtgctgcctggttataactatctcggacccggaaacggtctcgatcgaggagagcctgtcaacagggcagacgaggtcgcgcgagagcacgacatctcgtacaacgagcagcttgaggcgggagacaacccctacctcaagtacaaccacgcggacgccgagtttcaggagaagctcgccgacgacacatccttcgggggaaacctcggaaaggcagtctttcaggccaagaaaagggttctcgaaccttttggcctggttgaagagggtgctaagacggcccctaccggaaagcggatagacgaccactttccaaaaagaaagaaggcccggaccgaagaggactccaagcctcccacctcgtcagacgccgaagctggacccagcggatcccagcagctgcaaatcccagcccaaccagcctcaagtttgggagctgatacaatgtctgcgggaggtggcggcccattgggcgacaataaccaaggtgccgatggagtgggcaatgcctcgggagattggcattgcgattccacgtggatgggggacagagtcgtcaccaagtccacccgaacctgggtgctgcccagctacaacaaccaccagtaccgagagatcaaaagcggctccgtcgacggaagcaacgccaacgcctactttggatacagcaccccctgggggtactttgactttaaccgcttccacagccactggagcccccgagactggcaaagactcatcaacaactactggggcttcagaccccggtccctcagagtcaaaatcttcaacattcaagtcaaagaggtcacggtgcaggactccgccaccaccatcgccaacaacctcacctccaccgtccaagtgtttacggacgacgactaccagctgccctacgtcgtcggcaacgggaccgagggatgcctgccggccttccctccgcaggtctttacgctgccgcagtacggttacgcgacgctgaaccgcgacaacacagaaaatcccaccgagaggagcagcttcttctgcctagagtactttcccagcaagatgctgagaacgggcaacaactttgagtttacctacaactttgaggaggtgcccttccactccagcttcgctcccagtcagaacctcttcaagctggccaacccgctggtggaccagtacttgtaccgcttcgtgagcacaaataacactggcggagtccagttcaacaagaacctggccgggagatacgccaacacctacaaaaactggttcccggggcccatgggccgaacccagggctggaacctgggctccggggtcaaccgcgccagtgtcagcgccttcgccacgaccaataggatggagctcgagggcgcgagttaccaggtgcccccgcagccgaacggcatgaccaacaacctccagggcagcaacacctatgccctggagaacactatgatcttcaacagccagccggcgaacccgggcaccaccgccacgtacctcgagggcaacatgctcatcaccagcgagagcgagacgcagccggtgaaccgcgtggcgtacaacgtcggcgggcagatggccaccaacaaccagagctccaccactgcccccgcgaccggcacgtacaacctccaggaaatcgtgcccggcagcgtgtggatggagagggacgtgtacctccaaggacccatctgggccaagatcccagagacgggggcgcactttcacccctctccggccatgggcggattcggactcaaacacccaccgcccatgatgctcatcaagaacacgcctgtgcccggaaatatcaccagcttctcggacgtgcccgtcagcagcttcatcacccagtacagcaccgggcaggtcaccgtggagatggagtgggagctcaagaaggaaaactccaagaggtggaacccagagatccagtacacaaacaactacaacgacccccagtttgtggactttgccccggacagcaccggggaatacagaaccaccagacctatcggaacccgataccttacccgacccctttaa

SEQ ID NO: 818 - DNA, 2175 bp, Artificial Sequence
  source: /note="Description of Artificial Sequence: Synthetic polynucleotide"
atgtcttttgttgatcaccctccagattggttggaagaagttggtgaaggtcttcgcgagtttttgggccttgaagcgggcccaccgaaaccaaaacccaatcagcagcatcaagatcaagcccgtggtcttgtgctgcctggttataactatctcggacccggaaacggtctcgatcgaggagagcctgtcaacagggcagacgaggtcgcgcgagagcacgacatctcgtacaacgagcagcttgaggcgggagacaacccctacctcaagtacaaccacgcggacgccgagtttcaggagaagctcgccgacgacacatccttcgggggaaacctcggaaaggcagtctttcaggccaagaaaagggttctcgaaccttttggcctggttgaagagggtgctaagacggcccctaccggaaagcggatagacgaccactttccaaaaagaaagaaggcccggaccgaagaggactccaagccttccacctcgtcagacgccgaagctggacccagcggatcccagcagccgcaaatcccagcccaaccagcctcaagtttgggagctgatacaatgtctgcgggaggtggcggcccattgggcgacaataaccaaggtgccgatggagtgggcaatgcctcgggagattggcattgcgattccacgtggatgggggacagagtcgtcaccaagtccacccgaacctgggtgctgcccagctacaacaaccaccagtaccgagagatcaaaagcggctccgtcgacggaagcaacgccaacgcctactttggatacagcaccccctgggggtactttgactttaaccgcttccacagccactggagcccccgagactggcaaagactcatcaacaactactggggcttcagaccccggtccctcagagtcaaaatcttcaacattcaagtcaaagaggtcacggtgcaggactccaccaccaccatcgccaacaacctcacctccaccgtccaagtgtttacggacgacgactaccagctgccctacgtcgtcggcaacgggaccgagggatgcctgccggccttccctccgcaggtctttacgctgccgcagtacggttacgcgacgctgaaccgcgacaacacagaaaatcccaccgagaggagcagcttcttctgcctagagtactttcccagcaagatgctgagaacgggcaacaactttgagtttacctacaactttgaggaggtgcccttccactccagcttcgctcccagtcagaacctcttcaagctggccaacccgctggtggaccagtacttgtaccgcttcgtgagcacaaataacactggcggagtccagttcaacaagaacctggccgggagatacgccaacacctacaaaaactggttcccggggcccatgggccgaacccagggctggaacctgggctccggggtcaaccgcgccagtgtcagcgccttcgccacgaccaataggatggagctcgagggcgcgagttaccaggtgcccccgcagccgaacggcatgaccaacaacctccagggcagcaacacctatgccctggagaacactatgatcttcaacagccagccggcgaacccgggcaccaccgccacgtacctcgagggcaacatgctcatcaccagcgagagcgagacgcagccggtgaaccgcgtggcgtacaacgtcggcgggcagatggccaccaacaaccagagctccaccactgcccccgcgaccggcacgtacaacctccaggaaatcgtgcccggcagcgtgtggatggagagggacgtgtacctccaaggacccatctgggccaagatcccagagacgggggcgcactttcacccctctccggccatgggcggattcggactcaaacacccaccgcccatgatgctcatcaagaacacgcctgcgcccggaaatatcaccagcttctcggacgtgcccgtcagcagcttcatcacccagtacagcaccgggcaggtcaccgtggagatggagtgggagctcaagaaggaaaactccaagaggtggaacccagagatccagtacacaaacaactacaacgacccccagtttgtggactttgccccggacagcaccggggaatacagaaccaccagacctatcggaacccgataccttacccgacccctttaa

SEQ ID NO: 819 - DNA, 2175 bp, Artificial Sequence
  source: /note="Description of Artificial Sequence: Synthetic polynucleotide"
atgtcttttgttgatcaccctccagattggttggaagaagttggtgaaggtcttcgcgagtttttgggccttgaagcgggcccaccgaaaccaaaacccaatcagcagcatcaagatcaagcccgtggtcttgtgctgcctggttataactatctcggacccggaaacggtctcgatcgaggagagcctgtcaacagggcagacgaggtcgcgcgagagcacgacatctcgtacaacgagcagcttgaggcgggagacaacccctacctcaagtacaaccacgcggacgccgagtttcaggagaagctcgccgacgacacatccttcgggggaaacctcggaaaggcagtctttcaggccaagaaaagggttctcgaaccttttggcctggttgaagagggtgctaagacggcccctaccggaaagcggatagacgaccactttccaaaaagaaagaaggcccggaccgaagaggactccaagcctcccacctcgtcagacgccgaagctggacccagcggatcccagcagctgcaaatcccagcccaaccagcctcaagtttgggagctgatacaatgtctgcgggaggtggcggcccattgggcgacaataaccaaggtgccgatggagtgggcaatgcctcgggagattggcattgcgattccacgtggatgggggacagagtcgtcaccaagtccacccgaacctgggtgctgcccagctacaacaaccaccagtaccgagagatcaaaagcggctccgtcgacggaagcaacgccaacgcctactttggatacagcaccccctgggggtactttgactttaaccgcttccacagccactggagcccccgagactggcaaagactcatcaacaactactggggcttcagaccccggtccctcagagtcaaaatcttcaacattcaagtcaaagaggtcacggtgcaggactccaccaccaccatcgccaacaacctcacctccaccgtccaagtgtttacggacgacgactaccagctgccctacgtcgtcggcaacgggaccgagggatgcctgccggccttccctccgcaggtctttacgctgccgcagtacggttacgcgacgctgaaccgcgacaacacagaaaatcccaccgagaggagcagcttcttctgcctagagtactttcccagcaagatgctgagaacgggcaacaactttgagtttacctacaactttgaggaggtgcccttccactccagcttcgctcccagtcagaacctcttcaagctggccaacccgctggtggaccagtacttgtaccgcttcgtgagcacaaataacactggcggagtccagttcaacaagaacctggccgggagatacgccaacacctacaaaaactggttcccggggcccatgggccgaacccagggctggaacctgggctccggggtcaaccgcgccagtgtcagcgccttcgccacgaccaataggatggagctcgagggcgcgagttaccaggtgcccccgcagccgaacggcatgaccaacaacctccagggcagcaacacctatgccctggagaacactatgatcttcaacagccagccggcgaacccgggcaccaccgccacgtacctcgagggcaacatgctcatcaccagcgagagcgagacgcagccggtgaaccgcgtggcgtacaacgtcggcgggcagatggccaccaacaaccagagctccaccactgcccccgcgaccggcacgtacaacctccaggaaatcgtgcccggcagcgtgtggatggagagggacgtgtacctccaaggacccatctgggccaagatcccagagacgggggcgcactttcacccctctccggccatgggcggattcggactcaaacacccaccgcccatgatgctcatcaagaacacgcctgtgcccggaaatatcaccagcttctcggacgtgcccgtcagcagcttcatcacccagtacagcaccgggcaggtcaccgtggagatggagtgggagctcaagaaggaaaactccaagaggtggaacccagagatccagtacacaaacaactacaacgacccccagtttgtggactttgccccggacagcaccggggaatacagaaccaccagacctatcggaacccgataccttacccgacccctttaa

SEQ ID NO: 820 - DNA, 2175 bp, Artificial Sequence
  source: /note="Description of Artificial Sequence: Synthetic polynucleotide"
atgtcttttgttgatcaccctccagattggttggaagaagttggtgaaggtcttcgcgagtttttgggccttgaagcgggcccaccgaaaccaaaacccaatcagcagcatcaagatcaagcccgtggtcttgtgctgcctggttataactatctcggacccggaaacggtctcgatcgaggagagcctgtcaacagggcagacgaggtcgcgcgagagcacgacatctcgtacaacgagcagcttgaggcgggagacaacccctacctcaagtacaaccacgcggacgccgagtttcaggagaagctcgccgacgacacatccttcgggggaaacctcggaaaggcagtctttcaggccaagaaaagggttctcgaaccttttggcctggttgaagagggtgctaagacggcccctaccggaaagcggatagacgaccactttccaaaaagaaagaaggcccggaccgaagaggactccaagcctcccacctcgtcagacgccgaagctggacccagcggatcccagcagctgcaaatcccagcccaaccagcctcaagtttgggagctgatacaatgtctgcgggaggtggcggcccattgggcgacaataaccaaggtgccgatggagtgggcaatgcctcgggagattggcattgcgattccacgtggatgggggacagagtcgtcaccaagtccacccgaacctgggtgccgcccagctacaacaaccaccagtaccgagagatcaaaagcggctccgtcgacggaagcaacgccaacgcctactttggatacagcaccccctgggggtactttgactttaaccgcttccacagccactggagcccccgagactggcaaagactcatcaacaactactggggcttcagaccccggtccctcagagtcaaaatcttcaacattcaagtcaaagaggtcacggtgcaggactccaccaccaccatcgccaacaacctcacctccaccgtccaagtgtttacggacgacgactaccagctgccctacgtcgtcggcaacgggaccgagggatgcctgccggccttccctccgcaggtctttacgctgccgcagtacggttacgcgacgctgaaccgcgacaacacagaaaatcccaccgagaggagcagcttcttctgcctagagtactttcccagcaagatgctgagaacgggcaacaactttgagtttacctacaactttgaggaggtgcccttccactccagcttcgctcccagtcagaacctcttcaagctggccaacccgctggtggaccagtacttgtaccgcttcgtgagcacaaataacactggcggagtccagttcaacaagaacctggccgggagatacgccaacacctacaaaaactggttcccggggcccatgggccgaacccagggctggaacctgggctccggggtcaaccgcgccagtgtcagcgccttcgccacgaccaataggatggagctcgagggcgcgagttaccaggtgcccccgcagccgaacggcatgaccaacaacctccagggcagcaacacctatgccctggagaacactatgatcttcaacagccagccggcgaacccgggcaccaccgccacgtacctcgagggcaacatgctcatcaccagcgagagcgagacgcagccggtgaaccgcgtggcgtacaacgtcggcgggcagatggccaccaacaaccagagctccaccactgcccccgcgaccggcacgtacaacctccaggaaatcgtgcccggcagcgtgtggatggagagggacgtgtacctccaaggacccatctgggccaagatcccagagacgggggcgcactttcacccctctccggccatgggcggattcggactcaaacacccaccgcccatgatgctcatcaagaacacgcctgtgcccggaaatatcaccagcttctcggacgtgcccgtcagcagcttcatcacccagtacagcaccgggcaggtcgccgtggagatggagtgggagctcaagaaggaaaactccaagaggtggaacccagagatccagtacacaaacaactacaacgacccccagtttgtggactttgccccggacagcaccggggaatacagaaccaccagacctatcggaacccgataccttacccgacccctttaa

SEQ ID NO: 821 - DNA, 2175 bp, Artificial Sequence
  source: /note="Description of Artificial Sequence: Synthetic polynucleotide"
atgtcttttgttgatcaccctccagattggttggaagaagttggtgaaggtcttcgcgagtttttgggccttgaagcgggcccaccgaaaccaaaacccaatcagcagcatcaagatcaagcccgtggtcttgtgctgcctggttataactatctcggacccggaaacggtctcgatcgaggagagcctgtcaacagggcagacgaggtcgcgcgagagcacgacatctcgtacaacgagcagcttgaggcgggagacaacccctacctcaagtacaaccacgcggacgccgagtttcaggagaagctcgccgacgacacatccttcgggggaaacctcggaaaggcagtctttcaggccaagaaaagggttctcgaaccttttggcctggttgaagagggtgctaagacggcccctaccggaaagcggatagacgaccactttccaaaaagaaagaaggcccggaccgaagaggactccaagccttccacctcgtcagacgccgaagctggacccagcggatcccagcagctgcaaatcccagcccaaccagcctcaagtttgggagctgatacaatgtctgcgggaggtggcggcccattgggcgacaataaccaaggtgccgatggagtgggcaatgcctcgggagattggcattgcgattccacgtggatgggggacagagtcgtcaccaagtccacccgaacctgggtgctgcccagctacaacaaccaccagtaccgagagatcaaaagcggctccgtcgacggaagcaacgccaacgcctactttggatacagcaccccctgggggtactttgactttaaccgcttccacagccactggagcccccgagactggcaaagactcatcaacaactactggggcttcagaccccggtccctcagagtcaaaatcttcaacattcaagtcaaagaggtcacggtgcaggactccaccaccaccatcgccaacaacctcacctccaccgtccaagtgtttacggacgacgactaccagctgccctacgtcgtcggcaacgggaccgagggatgcctgccggccttccctccgcaggtctttacgctgccgcagtacggttacgcgacgctgaaccgcgacaacacagaaaatcccaccgagaggagcagcttcttctgcctagagtactttcccagcaagatgctgagaacgggcaacaactttgagtttacctacaactttgaggaggtgcccttccactccagcttcgctcccagtcagaacctcttcaagctggccaacccgctggtggaccagtacttgtaccgcttcgtgagcacaaataacactggcggagtccagttcaacaagaacctggccgggagatacgccaacacctacaaaaactggttcccggggcccatgggccgaacccagggctggaacctgggctccggggtcaaccgcgccagtgtcagcgccttcgccacgaccaataggatggagctcgagggcgcgagttaccaggtgcccccgcagccgaacggcatgaccaacaacctccagggcagcaacacctatgccctggagaacactatgatcttcaacagccagccggcgaacccgggcaccaccgccacgtacctcgagggcaacatgctcatcaccagcgagagcgagacgcagccggtgaaccgcgtggcgtacaacgtcggcgggcagatggccaccaacaaccagagctccaccactgcccccgcgaccggcacgtacaacctccaggaaatcgtgcccggcagcgtgtggatggagagggacgtgtacctccaaggacccatctgggccaagatcccagagacgggggcgcactttcacccctctccggccatgggcggattcggactcaaacacccaccgcccatgatgctcatcaagaacacgcctgcgcccggaaatatcaccagcttctcggacgtgcccgtcagcagcttcatcacccagtacagcaccgggcaggtcaccgtggagatggagtgggagctcaagaaggaaaactccaagaggtggaacccagagatccagtacacaaacaactacaacgacccccagtttgtggactttgccccggacagcaccggggaatacagaaccaccagacctatcggaacccgataccttacccgacccctttaa

SEQ ID NO: 822 - DNA, 2175 bp, Artificial Sequence
  source: /note="Description of Artificial Sequence: Synthetic polynucleotide"
atgtcttttgttgatcaccctccagattggttggaagaagttggtgaaggtcttcgcgagtttttgggccttgaagcgggcccaccgaaaccaaaacccaatcagcagcatcaagatcaagcccgtggtcttgtgctgcctggttataactatctcggacccggaaacggtctcgatcgaggagagcctgtcaacagggcagacgaggtcgcgcgagagcacgacatctcgtacaacgagcagcttgaggcgggagacaacccctacctcaagtacaaccacgcggacgccgagtttcaggagaagctcgccgacgacacatccttcgggggaaacctcggaaaggcagtctttcaggccaagaaaagggttctcgaaccttttggcctggctgaagagggtgctaagacggcccctaccggaaagcggatagacgaccactttccaaaaagaaagaaggcccggaccgaagaggactccaagccttccacctcgtcagacgccgaagctggacccagcggatcccagcagctgcaaatcccagcccaaccagcctcaagtttgggagctgatacaatgtctgcgggaggtggcggcccattgggcgacaataaccaaggtgccgatggagtgggcaatgcctcgggagattggcattgcgattccacgtggatgggggacagagtcgtcaccaagtccacccgaacctgggtgctgcccagctacaacaaccaccagtaccgagagatcaaaagcggctccgtcgacggaagcaacgccaacgcctactttggatacagcaccccctgggggtactttgactttaaccgcttccacagccactggagcccccgagactggcaaagactcatcaacaactactggggcttcagaccccggtccctcagagccaaaatcttcaacattcaagtcaaagaggtcacggtgcaggactccaccaccaccatcgccaacaacctcacctccaccgtccaagtgtttacggacgacgactaccagctgccctacgtcgtcggcaacgggaccgagggatgcctgccggccttccctccgcaggtctttacgctgccgcagtacggttacgcgacgctgaaccgcgacaacacagaaaatcccaccgagaggagcagcttcttctgcctagagtactttcccagcaagatgctgagaacgggcaacaaccttgagtttacctacaactttgaggaggtgcccttccactccagcttcgctcccagtcagaacctcttcaagctggccaacccgctggtggaccagtacttgtaccgcttcgtgagcacaaataacactggcggagtccagttcaacaagaacctggccgggagatacgccaacacctacaaaaactggttcccggggcccatgggccgaacccagggctggaacctgggctccggggtcaaccgcgccagtgtcagcgccttcgccacgaccaataggatggagctcgagggcgcgagttaccaggtgcccccgcagccgaacggcatgaccaacaacctccagggcagcaacacctatgccctggagaacactatgatcttcaacagccagccggcgaacccgggcaccaccgccacgtacctcgagggcaacatgctcatcaccagcgagagcgagacgcagccggtgaaccgcgtggtgcacaacgtcggcgggcagatggccaccaacaaccagagctccaccactgcccccgcgaccggcacgtacaacctccaggaaatcgtgcccggcagcgtgtggatggagagggacgtgtacctccaaggacccatctgggccaagatcccagagacgggggcgcactttcacccctctccggccatgggcggattcggactcaaacacccaccgcccatgatgctcatcaagaacacgcctgtgcccggaaatatcaccagcttctcggacgtgcccgtcagcagcttcatcacccagtacagcaccgggcaggtcaccgtggagatggagtgggagctcaagaaggaaaactccaagaggtggaacccggagatccagtacacaaacaactacaacgacccccagtttgtggactttgccccggacagcaccggggaatacagaaccaccagacctatcggaacccgataccttacccgacccctttaa

SEQ ID NO: 823 - DNA, 2175 bp, Artificial Sequence
  source: /note="Description of Artificial Sequence: Synthetic polynucleotide"
atgtcttttgttgatcaccctccagattggttggaagaagttggtgaaggtcttcgcgagtttttgggccttgaagcgggcccaccgaaaccaaaacccaatcagcagcatcaagatcaagcccgtggtcttgtgctgcctggttataactatctcggacccggaaacggtctcgatcgaggagagcctgtcaacagggcagacgaggtcgcgcgagagcacgacatctcgtacaacgagcagcttgaggcgggagacaacccctacctcaagtacaaccacgcggacgccgagtttcaggagaagctcgccgacgacacatccttcgggggaaacctcggaaaggcagtctttcaggccaagaaaagggttctcgaaccttttggcctggttgaagagggtgctaagacggcccctaccggaaagcggatagacgaccactttccaaaaagaaagaaggcccggaccgaagaggactccaagccttccacctcgtcagacgccgaagctggacccagcggatcccagcagctgcaaatcccagcccaaccagcctcaagtttgggagctgatacaatgtctgcgggaggtggcggcccattgggcgacaataaccaaggtgccgatggagtgggcaatgcctcgggagattggcattgcgattccacgtggatgggggacagagtcgtcaccaagtccacccgaacctgggtgctgcccagctacaacaaccaccagtaccgagagatcaaaagcggctccgtcgacggaggcaacgccaacgcctactttggatacagcaccccctgggggtactttgactttaaccgcttccacagccactggagcccccgggactggcaaagactcatcaacaactactggggcttcagaccccggtccctcagagtcaaaatcttcaacattcaagtcaaagaggtcacggtgcaggactccaccaccaccatcgccaacaacctcacctccaccgtccaagtgtttacggacgacgactaccagctgccctacgtcgtcggcaacgggaccgagggatgcctgccggccttccctccgcaggtctttacgctgccgcagtacggttacgcgacgctgaaccgcgacaacacagaaaatcccaccgagaggagcagcttcttctgcctagagtactttcccagcaagatgctgagaacgggcaacaactttgagtttacctacaactttgaggaggtgcccttccactccagcttcgctcccagtcagaacctcttcaagctggccaacccgctggtggaccagtacttgtaccgcttcgtgagcacaaataacactggcggagtccagttcaacaagaacctggccgggagatacgccaacacctacaaaaactggttcccggggcccatgggccgaacccagggctggaacctgggctccggggtcaaccgcgccagtgtcagcgccttcgccacgaccaataggatggagctcgagggcgcgagttaccaggtgcccccgcagccgaacggcatgaccaacaacctccagggcagcaacacctatgccctggagaacactatgatcttcaacagccagccggcgaacccgggcaccaccgccacgtacctcgagggcaacatgctcatcaccagcgagagcgagacgcagccggtgaaccgcgtggcgtacaacgtcggcgggcagatggccaccaacaaccagagctccaccactgcccccgcgaccggcacgtacaacctccaggaaatcgtgcccggcagcgtgtggatggagagggacgtgtacctccaaggacccatctgggccaagatcccagagacgggggcgcactttcacccctctccggccatgggcggattcggactcaaacacccaccgcccatgatgctcatcaagaacacgcctgcgcccggaaatatcaccagcttctcggacgtgcccgtcagcagcttcatcacccagtacagcaccgggcaggtcaccgtggagatggagtgggagctcaagaagggaaactccaagaggtggaacccagagatccagtacacaaacaactacaacgacccccagtttgtggactttgccccggacagcaccggggaatacagaaccaccagacctatcggaacccgataccttacccgacccctttaa

SEQ ID NO: 824 - DNA, 2175 bp, Artificial Sequence
  source: /note="Description of Artificial Sequence: Synthetic polynucleotide"
atgtcttttgttgatcaccctccagattggttggaagaagttggtgaaggtcttcgcgagtttttgggccttgaagcgggcccaccgaaaccaaaacccaatcagcagcatcaagatcaagcccgtggtcttgtgctgcctggttataactatctcggacccggaaacggtctcgatcgaggagagcctgtcaacagggcagacgaggtcgcgcgagagcacgacatctcgtacaacgagcagcttgaggcgggagacaacccctacctcaagtacaaccacgcggacgccgagtttcaggagaagctcgccgacgacacgtccttcgggggaaacctcggaaaggcagtctttcaggccaagaaaagggttctcgaaccttttggcctggttgaagagggtgctaagacggcccctaccggaaagcggatagacgaccactttccaaaaagaaagaaggcccggaccgaagaggactccaagccttccacctcgtcagacgccgaagctggacccagcggatcccagcagctgcaaatcccagcccaaccagcctcaagtttgggagctgatacaatgtctgcgggaggtggcggcccattgggcgacaataaccaaggtgccgatggagtgggcaatgcctcgggagattggcattgcgattccacgtggatgggggacagagtcgtcaccaagtccacccgaacctgggtgctgcccagctacaacaaccaccagtaccgagagatcaaaagcggctccgtcgacggaagcaacgccaacgcctactttggatacagcaccccctgggggtactttgactttaaccgcttccacagccactggagcccccgagactggcaaagactcatcaacaactactggggcttcagaccccggtccctcagagtcaaaatcttcaacattcaagtcaaagaggtcacggtgcaggactccaccaccaccatcgccaacaacctcacctccaccgtccaagtgtttacggacgacgactaccagctgccctacgtcgtcggcaacgggaccgagggatgcctgccggccttccctccgcaggtctttacgctgccgcagtacggttacgcgacgctgaaccgcgacaacacagaaaatcccaccgagaggagcagcttcttctgcctagagtactttcccagcaagatgctgagaacgggcaacaactttgagtttacctacaactttgaggaggtgcccttccactccagcttcgctcccagtcagaacctcttcaagctggccaacccgctggtggaccagtacttgtaccgcttcgtgagcacaaataacactggcggagtccagttcaacaagaacctggccgggagatacgccaacacctacaaaaactggttcccggggcccatgggccgaacccagggctggaacctgggctccggggtcaaccgcgccagtgtcagcgccttcgccacgaccaataggatggagctcgagggcgcgagttaccaggtgcccccgcagccgaacggcatgaccaacaacctccagggcagcaacacctatgccctggagaacactatgatcttcaacagccagccggcgaacccgggcaccaccgccacgtacctcgagggcaacatgctcatcaccagcgagagcgagacgcagccggtgaaccgcgtggcgtacaacgtcggcgggcagatggccaccaacaaccagagctccaccactgcccccgcgaccggcacgtacaacctccaggaaatcgtgcccggcagcgtgtggatggagagggacgtgtacctccaaggacccatctgggccaagatcccagagacgggggtgcactttcacccctctccggccatgggcggattcggactcaaacacccaccgcccatgatgctcatcaagaacacgcctgtgcccggaaatatcaccagcttctcggacgtgcccgtcagcagcttcatcacccagtacagcaccgggcaggtcaccgtggagatggagtgggagctcaagaaggaaaactccaagaggtggaacccagagatccagtacacaaacaactacaacgacccccagtttgtggactttgccccggacagcaccggggaatacagaaccaccagacctatcggaacccgataccttacccgacccctttaa

SEQ ID NO: 825 - DNA, 2175 bp, Artificial Sequence
  source: /note="Description of Artificial Sequence: Synthetic polynucleotide"
  modified_base (1652)..(1652): a, c, t, or g
atgtcttttgttgatcaccctccagattggttggaagaagttggtgaaggtcttcgcgagtttttgggccttgaagcgggcccaccgaaaccaaaacccaatcagcagcatcaagatcaagcccgtggtcttgtgctgcctggttataactatctcggacccggaaacggtctcgatcgaggagagcctgtcaacagggcagacgaggtcgcgcgagagcacgacatctcgtacaacgagcagcttgaggcgggagacaacccctacctcaagtacaaccacgcggacgccgagtttcaggagaagctcgccgacgacacatccttcgggggaaacctcggaaaggcagtctttcaggccaagaaaagggttctcgaaccttttggcctggttgaagagggtgctaagacggcccctaccggaaagcggatagacgaccactttccaaaaagaaagaaggcccggaccgaggaggactccaagccttccacctcgtcagacgccgaagctggacccagcggatcccagcagctgcaaatcccagcccaaccagcctcaagtttgggagctgatacaatgtctgcgggaggtggcggcccattgggcgacaataaccaaggtgccgatggagtgggcaatgcctcgggagattggcattgcgattccacgtggatgggggacagagtcgtcaccaagtccacccgaacctgggtgctgcccagctacaacaaccaccagtaccgagagatcaaaagcggctccgtcgacggaagcaacgccaacgcctactttggatacagcaccccctgggggtactttgactttaaccgcttccacagccactggagcccccgagactggcaaagactcatcaacaactactggggcttcagaccccggtccctcagagtcaaaatcttcaacattcaagtcaaagaggtcacggtgcaggactccaccaccaccatcgccaacaacctcacctccaccgtccaagtgtttacggacgacgactaccagctgccctacgtcgtcggcaacgggaccgagggatgcctgccggccttccctccgcaggtctttacgctgccgcagtacggttacgcgacgctgaaccgcgacaacacagaaaatcccaccgagaggagcagcttcttctgcctagagtactttcccagcaagatgctgagaacgggcaacaactttgagtttacctacaactttgaggaggtgcccttccactccagcttcgctcccagtcagaacctcttcaagctggccaacccgctggtggaccagtacttgtaccgcttcgtgagcacaaataacactggcggagtccagttcaacaagaacctggccgggagatacgccaacacctacaaaaactggttcccggggcccatgggccgaacccagggctggaacctgggctccggggtcaaccgcgccagtgtcagcgccttcgccacgaccaataggatggagctcgagggcgcgagttaccaggtgcccccgcagccgaacggcatgaccaacaacctccagggcagcaacacctatgccctggagaacactatgatcttcaacagccagccggcgaacccgggcaccaccgccacgtacctcgagggcagcatgctcatcaccancgagagcgagacgcagccggtgaaccgcgtggcgtacaacgtcggcgggcagatggccaccaacaaccagagctccaccactgcccccgcgaccggcacgtacaacctccaggaaatcgtgcccggcagcgtgtggatggagagggacgtgtacctccaaggacccatctgggccaagatcccagagacgggggcgcactttcacccctctccggccatgggcggattcggactcaaacacccaccgcccatgatgctcatcaagaacacgcctgtgcccggaaatatcaccagcttctcggacgtgcccgtcagcagcttcatcacccagtacagcaccgggcaggtcaccgtggagatggagtgggagctcaagaaggaaaactccaagaggtggaacccagagatccagtacacaaacaactacaacgacccccagtttgtggactttgccccggacagcaccggggaatacagaaccaccagacctatcggaacccgataccttacccgacccctttaa

SEQ ID NO: 826 - DNA, 2211 bp, Artificial Sequence
  source: /note="Description of Artificial Sequence: Synthetic polynucleotide"
atggctgctgacggttatcttccagattggctcgaggacaacctttctgaaggcattcgtgagtggtgggctctgaaacctggagtccctcaacccaaagcgaaccaacaacaccaggacaaccgtcggggtcttgtgcttccgggttacaaatacctcggacccggtaacggactcgacaaaggagagccggtcaacgaggcggacgcggcagccctcgaacacgacaaagcttacgaccagcagctcaaggccggtgacaacccgtacctcaagtacaaccacgccgacgccgagtttcaggagcgtcttcaagaagatacgtcttttgggggcaaccttggcagagcagtcttccaggccaaaaagaggatccttgagcctcttggtctggttgaggaagcagctaaaacggctcctggaaagaagaggcctgtagatcagtctcctcaggaaccggactcatcatctggtgttggcaaatcgggcaaacagcctgccagaaaaagactaaatttcggtcagactggcgactcagagtcagtcccagaccctcaacctctcggagaaccaccagcagcccccacaagtttgggatctaatacaatggcttcaggcggtggcgcaccaatggcagacaataacgagggtgccgatggagtgggtaattcctcaggaaattggcattgcgattcccaatggctgggcgacagagtcatcaccaccagcaccagaacctgggccctgcccacttacaacaaccatctctacaagcaaatctccagccaatcaggagcttcaaacgacaaccactactttggctacagcaccccttgggggtattttgactttaacagattccactgccacttctcaccacgtgactggcagcgactcattaacaacaactggggattccggcccaagaaactcagcttcaagctcttcaacatccaagttaaagaggtcacgcagaacgatggcacgacgactattgccaataaccttaccagcacggttcaagtgtttacggactcggagtatcagctcccgtacgtgctcgggtcggcgcaccaaggctgtctcccgccgtttccagcggacgtcttcatggtccctcagtatggatacctcaccctgaacaacggaagtcaagcggtgggacgctcatccttttactgcctggagtacttcccttcgcagatgctaaggactggaaataacttccaattcagctataccttcgaggatgtaccttttcacagcagctacgctcacagccagagtttggatcgcttgatgaatcctcttattgatcagtatctgtactacctgaacagaacgcaaggaacaacctctggaacaaccaaccaatcacggctgctttttagccaggctgggcctcagtctatgtctttgcaggccagaaattggctacctgggccctgctaccggcaacagagactttcaaagactgctaacgacaacaacaacagtaactttccttggacagcggccagcaaatatcatctcaatggccgcgactcgctggtgaatccaggaccagctatggccagtcacaaggacgatgaagaaaaatttttccctatgcacggcaatctaatatttggcaaagaagggacaacggcaagtaacgcagaattagataatgtaatgattacggatgaagaagagattcgtaccaccaatcctgtggcaacagagcagtatggaactgtggcaaataacttgcagagctcaaatacagctcccacgactagaactgtcaatgatcagggggccttacctggcatggtgtggcaagatcgtgacgtgtaccttcaaggacctatctgggcaaagattcctcacacggatggacactttcatccttctcctctgatgggaggctttggactgaaacatccgcctcctcaaatcatgatcaaaaatactccggtaccggcaaatcctccgacgactttcagcccggccaagtttgcttcatttatcactcagtactccactggacaggtcagcgtggaaattgagtgggagctacagaaagaaaacagcaaacgttggaatccagagattcagtacacttccaactacaacaagtctgttaatgtggactttactgtagacactaatggtgtttatagtgaacctcgccctattggaacccggtatctcacacgaaacttgtaa

SEQ ID NO: 827 - DNA, 2205 bp, Artificial Sequence; identical to SEQ ID NO: 95
  source: /note="Description of Artificial Sequence: Synthetic polynucleotide"

SEQ ID NO: 828 - DNA, 2234 bp, Artificial Sequence
  source: /note="Description of Artificial Sequence: Synthetic polynucleotide"
atgtcttttgttgatcaccctccagattggttggaagaagttggtgaaggtcttcgcgagtttttgggccttgaagcgggcccaccgaaaccaaaacccaatcagcagcatcaagatcaagcccgtggtcttgtgctgcctggttataactatctcggacccggaaacggtctcgatcgaggagagcctgtcaacagggcagacgaggtcgcgcgagagcacgacatctcgtacaacgagcagcttgaggcgggagacaacccctacctcaagtacaaccacgcggacgccgagtttcaggagaagctcgccgacgacacatccttcgggggaaacctcggaaaggcagtctttcaggccaagaaaagggttctcgaaccttttggcctggttgaagagggtgctaagacggcccctaccggaaagcggatagacgaccactttccaaaaagaaagaaggctcggaccgaagaggactccaagccttccacctcgtcagacgccgaagctggacccagcggatcccagcagctgcaaatcccagcccaaccagcctcaagtttgggagctgatacaatgtctgcgggaggtggcggcccattgggcgacaataaccaaggtgccgatggagtgggcaatgcctcgggagattggcattgcgattccacgtggatgggggacagagtcgtcaccaagtccacccgaacctgggtgctgcccagctacaacaaccaccagtaccgagagatcaaaagcggctccgtcgacggaagcaacgccaacgcctactttggatacagcaccccctgggggtactttgactttaaccgcttccacagccactggagcccccgagactggcaaagactcatcaacaactactggggcttcagaccccggtccctcagagtcaaaatcttcaacattcaagtcaaagaggtcacggtgcaggactccaccaccaccatcgccaacaacctcacctccaccgtccaagtgtttacggacgacgactaccagctgccctacgtcgtcggcaacgggaccgagggatgcctgccggccttccctccgcaggtctttacgctgccgcagtacggttacgcgacgctgaaccgcgacaacacagaaaatcccaccgagaggagcagcttcttctgcctagagtactttcccagcaagatgctgagaacgggcaacaactttgagtttacctacaactttgaggaggtgcccttccactccagcttcgctcccagtcagaacctgttcaagctggccaacccgctggtggaccagtacttgtaccgcttcgtgagcacaaataacactggcggagtccagttcaacaagaacctggccgggagatacgccaacacctacaaaaactggttcccggggcccatgggccgaacccagggctggaacctgggctccggggtcaaccgcgccagtgtcagcgccttcgccacgaccaataggatggagctcgagggcgcgagttaccaggtgcccccgcagccgaacggcatgaccaacaacctccagggcagcaacacctatgccctggagaacactatgatcttcaacagccagccggcgaacccgggcaccaccgccacgtacctcgagggcaacatgctcatcaccagcgagagcgagacgcagccggtgaaccgcgtggcgtacaacgtcggcgggcagatggccaccaacaaccagagctccaccactgcccccgcgaccggcacgtacaacctccaggaaatcgtgcccggcagcgtgtggatggagagggacgtgtacctccaaggacccatctgggccaagatcccagagacgggggcgcactttcacccctctccggccatgggcggattcggactcaaacacccaccgcccatgatgctcatcaagaacacgcctgtgcccggaaatatcaccagcttctcggacgtgcccgtcagcagcttcatcacccagtacagcaccgggcaggtcaccgtggagatggagtgggagctcaagaaggaaaactccaagaggtggaacccagagatccagtacacaaacaactacaacgacccccagtttgtggactttgccccggacagcaccggggaatacagaaccaccagacctatcggaacccgataccttacccgacccctttaacccattcatgtcgcataccctcaataaaccgtgtattcgtgtcagtaaaatactgcctc

SEQ ID NO: 829 - protein, 736 aa, Artificial Sequence
  source: /note="Description of Artificial Sequence: Synthetic polypeptide"
MAADGYLPDWLEDNLSEGIREWWALKPGVPQPKANQQHQDNRRGLVLPGYKYLGPGNGLDKGEPVNEADAAALEHDKAYDQQLKAGDNPYLKYNHADAEFQERLQEDTSFGGNLGRAVFQAKKRILEPLGLVEEAAKTAPGKKRPVDQSPQEPDSSSGVGKSGKQPARKRLNFGQTGDSESVPDPQPLGEPPAAPTSLGSNTMASGGGAPMADNNEGADGVGNSSGNWHCDSQWLGDRVITTSTRTWALPTYNNHLYKQISSQSGASNDNHYFGYSTPWGYFDFNRFHCHFSPRDWQRLINNNWGFRPKKLSFKLFNIQVKEVTQNDGTTTIANNLTSTVQVFTDSEYQLPYVLGSAHQGCLPPFPADVFMVPQYGYLTLNNGSQAVGRSSFYCPEYFPSQMLRTGNNFQFSYTFEDVPFHSSYAHSQSLDRLMNPLIDQYLYYLNRTQGTTSGTTNQSRLLFSQAGPQSMSLQARNWLPGPCYRQQRLSKTANDNNNSNFPWTAASKYHLNGRDSLVNPGPAMASHKDDEEKFFPMHGNLIFGKEGTTASNAELDNVMITDEEEIRTTNPVATEQYGTVANNLQSSNTAPTTRTVNDQGALPGMVWQDRDVYLQGPIWAKIPHTDGHFHPSPLMGGFGLKHPPPQIMIKNTPVPANPPTTFSPAKFASFITQYSTGQVSVEIEWELQKENSKRWNPEIQYTSNYNKSVNVDFTVDTNGVYSEPHPIGTRYLTRNL

SEQ ID NO: 830 - protein, 736 aa, Artificial Sequence
  source: /note="Description of Artificial Sequence: Synthetic polypeptide"
MAADGYLPDWLEDNLSEGIREWWALKPGVPQPKANQQHQDNRRGLVLPGYKYLGPGNGLDKGEPVNEADAAALEHDKAYDQQLKAGDNPYLKYNHADAEFQERLQEDTSFGGNLGRAVFQAKKRILEPLGLVEEAAKTAPGKKRPVDQSPQEPDSSSGVGKSGKQPARKRLNFGQTGDSESVPDPQPLGEPPAAPTSLGSNTMASGGGAPMADNNEGADGVGNSSGNWHCDSQWLGDRVITTSTRTWALPTYNNHLYKQISSQSGASNDNHYFGYSTPWGYFDFNRFHCHFSPRDWQRLINNNWGFRPKKLSFKLFNIQVKEVTQNDGTTTVANNLTSTVQVFTDSEYQLPYVLGSAHQGCLPPFPADVFMVPQYGYLTLNNGSQAVGRSSFYCLEYFPSQMLRTGNNFQFSYTFEDVPFHSSYAHSQSLDRLMNPLIDQYLYYLNRTQGTTSGTTNQSRLLFSQAGPQSMSLQARNWLPGPCYRQQRLSKTANDNNNSNFPWTAASKYHLNGRDSLVNPGPAMASHKDDEEKFFPMHGNLIFGKEGTTASNAELDNVMITDEEEIRTTNPVATEQYGTVANNLQSSNTAPTTRTVNDQGALPGMVWQDRDVYLQGPIWAKIPHTDGHFHPSPLMGGFGLKHPPPQIMIKNTPVPANPPTTFSPAKFASFITQYSTGQVSVEIEWELQKENSKRWNPEIQYTSNYNKSVNVDFTVDTNGVYSEPRPIGTRYLTRNL

SEQ ID NO: 831 - protein, 736 aa, Artificial Sequence
  source: /note="Description of Artificial Sequence: Synthetic polypeptide"
MAADGYLPDWLEDNLSEGIREWWALKPGVPQPKANQQHQDNRRGLVLPGYKYLGPGNGLDKGEPVNEADAAALEHDKAYDQQLKAGDNPYLKYNHADAEFQERLQEDTSFGGNLGRAVFQAKKRILEPLGLVEEAAKTAPGKKRPVDQSPQEPDSSSGVGKSGKQPARKRLNFGQTGDSESVPDPQPLGEPPAAPTSLGSNTMASGGGAPMADNNEGADGVGNSSGNWHCDSQWLGDRVITTSTRTWALPTYNNHLYKQISGQSGASNDNHYFGYSTPWGYFDFNRFHCHFSPRDWQRLINNNWGFRPKKLSFKLFNIQVKEVTQNDGTTTIANNLTSTVQVFTDSEYQLPYVLGSAHQGCLPPFPADVFMVPQYGYLTLNNGSQAVGRSSFYCLEYFPSQMLRTGNNFQFSYTFEDVPFHSSYAHSQSLDRLMNPLIDQYLYYLNRTQGTTSGTTNQSRLLFSQAGPQSMSLQARNWLPGPCYRQQRLSKTANGNNNSNFPWTAASKYHLNGRDSLVNPGPAMASHKDDEEKFFPMHGNLIFGKEGTTASNAELDNVMITDEEEIRTTNPVATEQCGTVANNLQSSNTAPTTRTVNDQGALPGMVWQDRDVYLQGPIWAKIPHTDGHFHPSPLMGGFGLKHPPPQIMIKNTPVPANPPTTFSPAKFASFITQYSTGQVSVEIEWELQKENSKRWNPEIQYTSNYNKSVNVDFTVDTNGVYSEPRPIGTRYLTRNL

SEQ ID NO: 832 - protein, 736 aa, Artificial Sequence
  source: /note="Description of Artificial Sequence: Synthetic polypeptide"
MAADGYLPDWLEDNLSEGIREWWALKPGVPQPKANQQHQDNRRGLVLPGYKYLGPGNGLDKGEPVNEADAAALEHDKAYDQQLKAGDNPYLKYNHADAEFQERLQEDTSFGGNLGRAVFQAKKRILEPLGLVEGAAKTAPGKKRPVDQSPQEPDSSSGVGKSGKQPARKRLNFGQTGDSESVPDPQPLGEPPAAPTSLGSNTMASGGGAPMADNNEGADGVGNSSGNWHCDSQWLGDRVITTSTRTWALPTYNSHLYKQISSQSGASNDNHYFGYSTPWGYFDFNRFHCHFSPRDWQRLINNNWGFRPKKLSFKLFNIQVKEVTQNDGTTTIANNLTSTVQVFTDSEYQLPYVLGSAHQGCLPPFPADAFMVPQYGYLTLNNGSQAVGRSSFYCLEYFPSQMLRTGNNFQFSYTFEDVPFHGSYAHSQSLDRLMNPLIDQYLYYLNRTQGTTSGTTNQSRLLFSQAGPQSMSLQARNWLPGPCYRQQRLSKTANDNNNSNFPWTAASKYHLNGRDSLVNPGPAMASHKDDEEKFFPMHGNLIFGKEGTTASNAELDNVMITDEEEIRTTNPVATEQYGTVANNLQSSNTAPTTRTVNDQGALPGMVWQDRDVYLQGPIWAKIPHTDGHFHPSPLMGGFGLKHPPPQIMIKNTPVPANPPTTFSPAKFASFITQYSTGQVSVEIEWELQKENSKRWNPEIQYTSNYNKSVNVDFTVDTNGVYSEPRPIGTRYLTRNS

SEQ ID NO: 833 - protein, 736 aa, Artificial Sequence
  source: /note="Description of Artificial Sequence: Synthetic polypeptide"
MAADGYLPDWLEDNLSEGIREWWALKPGVPQPKANQQHQDNRRGLVLPGYKYLGPGNGLDKGEPVNEADAAALEHDKAYDQQLKAGDNPYLKYNHADAEFQERLQEDTSFGGNLGRAVFQAKKRILEPLGLVEGAAKTAPGKKRPVDQSPQEPDSSSGVGKSGKQLARKRLNFGQTGDSESVPDPQPLGEPPAAPTSLGSNTMASGGGAPMADNNEGADGVGNSSGNWHCDSQWLGDRVITTSTRTWALPTYNSHLYKQISGQSGASNDNHYFGYSTPWGYFDFNRFHCHFSPRDWQRLINNNWGFRPKKLSFKLFNIQVKEVTQNDGTTTIANNLTSTVQVFTDSEYQLPYVLGSAHQGCLPPFPADVFMVPQYGYLTLNNGSQAVGRSSFYCLEYFPSQMLRTGNNFQFSYTFEDVPFHSSYAHSQSLDRLMNPLIDQYLYYLNRTQGTTSGTTNQSRLLFSQAGPQSMSLQARNWLPGPCYRQQRLSKTANDNNNSNFPWTAASKYHLNGRDSLVNPGPAMASHKDDEEKFFPMHGNLIFGKEGTTASNAELDNVMITDEEEIRTTNPVATEQYGTVANNLQSSNTAPTTRTVNDQGALPGMVWQDRDVYLQGPIWAKIPHTDGHFHPSPLMGGFGLKHPPPQIMIKNTPVPANPPTTFSPAKFASFITQYSTGQVSVEIEWELQKENSKRWNPEIQYTSNYNKSVNVDFTVDTNGVYSEPRPIGTRYLTRNL

SEQ ID NO: 834 - protein, 736 aa, Artificial Sequence
  source: /note="Description of Artificial Sequence: Synthetic polypeptide"
MAADGYLPDWLEDNLSEGIREWWALKPGVPQPKANQQHQDDRRGLVLPGYKYLGPGNGLDKGEPVNEADAAALEHDKAYDQQLKAGDNPCLKYNHADAEFQERLQEDTSFGGNLGRAVFQAKKRILEPLGLVEEAAKTAPGKKRPVDQSPQEPDSSSGVGKSGKQPARKRLNFGQTGDSESVPDPQPLGEPPAAPTSLGSNTMASGGSAPMADNNEGADGVGNSSGNWHCDSQWLGDRVITTSTRTWALPTYNNHLYKQISSQSGASNDNHYFGYSTPWGYFDFNRFHCHFSPRDWQRLINNNWGFRPKKLSFKLFNIQVKEVTQNDGTTTIANNLTSTVQVFTDSEYQLPYVLGSAHQGCLPPFPADVFMVPQYGYLTLNNGSQAVGRSSFYCLEYFPSQMLRTGNNFQFSYTFEDVPFHSSYAHSQSLDRLMDPLIDQYLYYLNRTQGTTSGTTNQSRLLFSQAGPQSMSLQARNWLPGPCYRQQRLSKTANDNNNSNFPWTAASKYHLNGRDSLVNPGPAMASHKDDEEKFFPMHGNLIFGKEGTTASNAELDNVMITDEEEIRTTNPVATEQYGTVANNLQSSNTAPTTRTVNDQGALPGMVWQDRDVYLQGPIWAKIPHTDGHFHPSPLMGGFGLKHPPPQIMIKNTPVPANPPTTFSPAKFASFITQYSTGQVSVEIEWELQKENSKRWNPEIQYTSNYNKSVNVDFTVDTNGVYSEPRPIGTRYLTRNL

SEQ ID NO: 835 - protein, 736 aa, Artificial Sequence
  source: /note="Description of Artificial Sequence: Synthetic polypeptide"
MAADGYLPDWLEDNLSEGIREWWALKPGVPQPKANQQHQDDRRGLVLPGYKYLGPGNGLDKGEPVNEADAAALEHDKAYDQQLKAGDNPYLKYNHADAEFQERLQEDTSFGGNLGRAVFQAKKRILEPLGLVEEAAKTAPGKKRPVDQSPQEPDSSSGVGKSGKQPARKRLNFGQTGDSESVPDPQPLGEPPAAPTSLGSNTMASGGGAPMADNNEGADGVGNSSGNWHCDSQWLGNRVITTSTRTWALPTYNNHLYKQISSQSGASNDNHYFGYSTPWGYFDFNRFHCHFSPRDWQRLINNNWGFRPKKLSFKLFNIQVKEVTQNDGTTTIANNLTSTVQVFTDSEYQLPYVLGSAHQGCLPPFPADVFMVPQYGYLTLNNGSQAVGRSSFYCLEYFPSQMLRTGNNFQFSYTFEDVPFHSSYAHSQSLDRLMNPLIDQYLYYLNRTQGTTSGTTNQSRLLFSQAGPQSMSLQARNWLPGPCYRQQRLSKTANDNNNSNFPWTAASKYHLNGRDSLVNPGPAMASHKDDEEKFFPMHGNLIFGKEGTTASNAELDNVMITDEEEIRTTNPVATEQYGTVANNLQSSNTAPTTRTVNDQGALPGMVWQDRDVYLQGPIWAKIPHTDGHFHPSPLMGGFGLKHPPPQIMIKNTPVPANPPTTFSPAKFASFITQYSTGQVSVEIEWELQKENSKRWNPEIQYTSNYNKSVNVDFTVDTNGVYSEPRPIGTRYLTRNL

SEQ ID NO: 836 - protein, 736 aa, Artificial Sequence
  source: /note="Description of Artificial Sequence: Synthetic polypeptide"
MAADGYLPDWLEDNLSEGIREWWALKPGVPQPKANQQHQDDRRGLVLPGYKYLGPGNGLDKGEPVNEADAAALEHDKAYDQQLKAGDNPYLKYNHADAEFQERLQEDTSFGGNLGRAVFQAKKRILEPLGLVEEAAKTAPGKKRPVDQSPQEPDSSSGVGKSGKQPARKRLNFGQTGDSESVPDPQPLGEPPAAPTSLGSNTMASGGGAPMADNNEGADGVGNSSGNWHCDSQWLGDRVITTSTRTWALPTYNNHLYKQISSQSGASNDNHYFGYSTPWGYFDFNRFHCHFSPRDWQRLINNNWGFRPKKLSFKLFNIQVKEVTQNDGTTTIANNLTSTVQVFTDSEYQLPYVLGSAHQGCLPPFPADVFMVPQYGYLTLNNGSQAVGRSSFYCLEYFPSQMLRTGNNFQFSYTFEDVPFHSSYAHSQSLDRLMNPLIDQYLYYLNRTQGTTSGTTNQSRLLFSQAGPQSMSLQARNWLPGPCYRQQRLSKTANDNNNSNFPWTAASKYHLNGRDSLVNPGPAMASHKDDEEKFFPMHGNLIFGKEGTTASNAELDNVMITDEEEIRTTNPVATVQYGTVANNLQSSNTAPTTRTVNDQGALPGMVWQDRDVYLQGPIWAKIPHTDGHFHPSPLMGGFGLKHPPPQIMIKNTPVPANPPTTFSPAKFASFITQYSTGQVSVEIEWELQKENSKRWNPEIQYTSNYNKSVNVDFTVDTNGVYSEPRPIGTRYLTRNL

SEQ ID NO: 837 - protein, 735 aa, Artificial Sequence
  source: /note="Description of Artificial Sequence: Synthetic polypeptide"
MAADGYLPDWLEDNLSEGIREWWALKPGVPQPKANQQHQDNRRGLVLPGYKYLGPGNGLDKGEPVNEADAAALEHDKAYDQQLKAGDNPYLKYNHADAEFQERLQEDTSFGGNLGRAVFQAKKGILEPLGLVEEAAKTAPGKKRPVDQSPQEPDSSSGVGKSGKQPARKRLNFGQTGDSESVPDPQPLGEPPAAPTSLGSNTMASGGGAPMADNNEGADGVGNSSGNWHCDSQWLGDRVITTSTRTWALPTYNNHLYKQISSQSGASNDNHYFGYSTPWGYFDFNRFHCHFSPRDWQRLINNNWGFRPKKLSFKLFNIQVKEVTQNDGTTTIANNLTSTVQVFTDSEYQLPYVFGSAHQGCLPPFPADVFMVPQYGYLTLNNGSQAVGRSSFYCLEYFPSQMLRTGNNFQFSYTFEDVPFHSSYAHSQSSDRLMNPLIDQYLYYLNRTQGTTSGTTNQSRLLFSQAGPQSMSLQARNWLPGPCYRQQRLSKTANDNNNSNFPTAASKYHLNGRDSLVNPGPAMASHKDDEEKFFPMHGNLIFGKEGTTASNAELDNVMITDEEEIRTTNPVATEQYGTVANNLQSSNTAPTTRTVNDQGALPGMVWQDRDVYLQGPIWAKIPHTDGHFHPSPLMGGFGLKHPPPQIMIKNTPVPANPPTTFSPAKFASFITQYSTGQVSVEIEWELQKENSKRWNPEIQYTSNYNKSVNVDFTVDTNGVYSEPRPIGTRYLTRNL

SEQ ID NO: 838 - protein, 736 aa, Artificial Sequence
  source: /note="Description of Artificial Sequence: Synthetic polypeptide"
MAADGYLPDWLEDNLSEGIREWWALKPGVPQPKANQQHQDNRRGLVLPGYKYLGPGNGLDEGEPVNEADAAALEHDKAYDQQLKAGDNPYLKYNHADAEFQERLQEDTSFGGNLGRAVFQAKKRILEPLGLVEGAAKTAPGKKRPVDQSPQEPDSSSGVGKSGKQPARKRLNFGQTGDSESVPDPQPLGEPPAAPTSLGSNTMASGGGAPMADNNEGADGVGNSSGNWHCDSQWLGDRVITTSTRTWALPTYNSHLYKQISSQSGASNDNHYFGYSTPWGYFDFNRFHCHFSPRDWQRLINNNWGFRPKKLSFKLFNIQVKEVTQNDGTTTIANNLTSTVQVFTDSEYQLPYVLGSAHQGCLPPFPADVFMVPQYGYLTLNNGSQAVGRSSFYCLEYFPSQMLRTGNNFQFSYTFEDVPFHSSYAHSQSLDRLMNPLIDQYLYYLNRTQGTTSGTTNQSRLLFSQAGPQSMSLQARNWLPGPCYRQQRLSKTANDNNNSNFPWTAASKYHLNGRDSLVNPGPAMASHKDDEEKFFPMHGNLIFGKEGTTASNAELDNVMITDEEEIRTTNPVATEQYGTVANNLQSSNTAPTTRTVNDQGALPGMVWQDRDVYLQGPIWAKIPHTDGHFHPSPLMGGFGLKHPPPQIMIKNTPVPANPPTTFSPAKFASFITQYSTGQVSVEIEWELQKENSKRWNPEIQYTSNYNKSVNVDFTVDTNGVYSEPRPIGTRYLTRNL

SEQ ID NO: 839 - protein, 668 aa, Artificial Sequence
  source: /note="Description of Artificial Sequence: Synthetic polypeptide"
MAADGYLPDWLEDNLSEGIREWWALKPGVPQPKANQQHQDNRRGLVLPGYKYLGPGNGLDKGEPVNEADAAALEHDKAYDQQLKAGDNPYLKYNHADAEFQERLQEDTSFGGNLGRAVFQAKKRILEPLGLVEGAAKTAPGKKRPVDQSPQEPDSSSGVGKSGKQPARKRLNFGQTGDSESVPDPQPLGEPPAAPTSLGSNTMASGGGAPMADNNEGADGVGNSSGNWHCDSQWLGDRVITTSTRTWALPTYNSHLYKQISSQSGASNDNHYFGYSTPWGILTLTDSTATSHHVTGSDSLTTTGDSGPRNSASSSSTSKLKRSRRTMARRLLPITLPARFKCLRTRSISSRTCSGRRTKAVSRRFQRTPSWSLSMDTSPTTEVKRWDAHPFTAWSTSLRRCGLEITSNSAIPSRMYLFTAATLTARVWIAILLLISICTTTERKEQPLEQPTNHGCFLARLGLSLCLCRPEIGYLGPATGNRDFQRLLTTTTTVTFLGQRPANIISMAATRWIQDQLWPVTRTMKKNFSLCTAIRGPYLAWCGKIVTCTFKDLSGQRFLTRMDTFILLLWEALDNIRLLKSSKILRYRQILRRLSARPSLLHLSLSTPLDRSAWKLSGSYRKKTANVGIQRFSTLPTTTSLLMWTLLTLMVFIVNLALLEPGISHETC

SEQ ID NO: 840 - protein, 734 aa, Artificial Sequence
  source: /note="Description of Artificial Sequence: Synthetic polypeptide"
MTDGYLPDWLEDNLSEGVREWWALQPGAPKPKANQQHQDNARGLVLPGYKYLGPGNGLDKGEPVNAADAAALEHDKAYDQQLKAGDNPYLKYNHADAEFQQRLQGDTSFGGNLGRAVFQAKKRVLEPLGLVEQAGETAPGKKRPLIESPQQPDSSTGIGKKGKQPAKKKLVFEDETGAGDGPPEGSTSGAMSDDSEMRAATGGAAVEGGQGADGVGNASGDWHCDSTWSEGHVTTTSTRTWVLPTYNNHLYKRLGESLQSNTYNGFSTPWGYFDFNRFHCHFSPRDWQRLINNNWGMRPKAMRVKIFNIQVKEVTTSNGETTVANNLTSTVQIFADSSYELPYVMDAGQEGSLPPFPNDVFMVPQYGYCGLVTGNTSQQQTDRNAFYCLEYFPSQMLRTGNNFEITYSFEKVPFHSMYAHSQSLDRLMNPLIDQYLWGLQSTTTGTTLNAGTATTNFTKLRPTNLSNFKKNWLPGPSIKQQGFSKTANQNYKIPATGSDSLIKYETHSTLDGRWSALTPGPPMATAGPADSKFSNSQLIFAGPKQNGNTATVPGTLIFTSEEELAATNATDTDMWGNLPGGDQSNSNLPTVDRLTALGAVPGMVWQNRDIYYQGPIWAKIPHTDGHFHPSPLIGGFGLKHPPPQIFIKNTPVPANPATTFSSTPVNSFITQYSTGQVSVQIDWEIQKERSKRWNPEVQFTSNYGQQNSLLWAPDAAGKYTEPRAIGTRYLTHHL

SEQ ID NO: 841 - protein, 734 aa, Artificial Sequence
  source: /note="Description of Artificial Sequence: Synthetic polypeptide"
MTDGYLPDWLEDNLSEGVREWWALQPGAPKPKANQQHQDNARGLVLPGYKYLGPGNGLDKGEPVNAADAAALEHDKAYDQQLKAGDNPYLKYNHADAEFQQRLQGDTSFGGNLGRAVFQAKKRVLEPLGLVEQAGETAPGKKRPLIESPQQPDSSTGIGKKGKQPAKKKLVFEDETGAGDGPPEGSTSGAMSDDSEMRAAAGGAAVEGGQGADGVGNASGDWHCDSTWSEGHVTTTSTRTWVLPTYNNHLYKRLGESLQSNTYNGFSTPWGYFDFNRFHCHFLPRDWQRLINNNWGVRPKAMRVKIFNIQVKEVTTSNGETTVANNLTSTVQIFADSSYELPYVMDAGQEGSLPPFPNDVFMVPQYGYCGLVTGDTSQQQTDRNAFYCLEYFPSQMLRTGNNFEITYSFEKVPFHSMYAHSQSLDRLMNPLIDQYLWGLQSTTTGTTLNAGTATTNFTKLRPTNFSNFKKNWLPGPSIKQQGFSKTANQNYKIPATGSDSLIKYETHSTLDGRWSALTPGPPMATAGPADSKFSNSQLIFAGPKQNGNTATVPGTLIFTSEEELAATNATDTDMWGNLPGGDQSNSNLPTVDRLTALGAVPGMVWQNRDIYYQGPIWAKIPHTDGHFHPSPLIGGFGLKHPPPQIFIKNTPVPANPATTFSSTPVNSFITQYSTGQVSVQIDWEIQKERSKRWNPEVQFTSNYGQQNSLLWAPDAAGKYTEPRAIGTRYLTHHL

SEQ ID NO: 842 - protein, 734 aa, Artificial Sequence
  source: /note="Description of Artificial Sequence: Synthetic polypeptide"
MTDGYLPDWLEDNLSEGVREWWALQPGAPKPKANQQHQDNARGLVLPGYKYLGPGNGLDEGEPVNAADAAALEHDKAYDQQLKAGDNPYLKYNHADAEFQQRLQGDTSFGGNLGRAVFQAKKRVLEPLGLVEQAGETAPGKKRPLIESPQQPDSSTGIGKKGKQPAKKKLVFEDETGAGDGPPEGSTSGAMSDDSEMRAAAGGAAVEGGQGADGVGNASGDWHCDSTWSEGHVTTTSTRTWVLPTYNNHLYKRLGESLQSNTYNGFSTPWGYFDFNRFHCHFSPRDWQRLINNNWGMRPKAMRVKIFNIQVKEVTTSNGETTVANNLTSTVQIFADSSYELPYVMDAGQEGSLPPFPNDVFMVPQYGYCGLVTGNTSQQQTDRNAFYCLEYFPSQMLRTGNNFEITYSFEKVPFHSMYAHSQSLDRLMNPLIDQYLWGLQSTTTGTTLNAGTATTNFTKLRPTNFSNFKKNWLPGPSIKQQGFSKTANQNYKIPATGSDSLIKYETHSTLDGRWSALTPGPPMATAGPADSKFSNSQLIFAGPKQNGNTATVPGTLIFTSEEELAATNATDTDMWGNLPGGDQSNSNLPTVDRLTALGAVPGMVWQNRDIYYQGPIWAKIPHTDGHFHPSPLIGGFGLKHPPPQIFIKNTPVPANPATTFSSTPVNSFITQYSTGQVSVQIDWEIQKERSKRWNPEVQFTSNYGQQNSLLWAPDAAGKYTEPRAIGTRYLTHHL

SEQ ID NO: 843 - protein, 734 aa, Artificial Sequence
  source: /note="Description of Artificial Sequence: Synthetic polypeptide"
MTDGYLPDWLEDNLSEGVREWWALQPGAPKPKANQQHQDNARGLVLPGYKYLGPGNGLDKGEPVNAADAAALEHDKAYDQQLKAGDNPYLKYNHADAEFQQRLQGDTSFGGNLGRAVFQAKKRVLEPLGLVEQAGETAPGKKRPLIESPQQPDSSTGIGKKGKQPAKKKLVFEDGTGAGDGPPEGSTSGAMSDDSEMRAAAGGAAVEGGQGADGVGNASGDWHCDSTWSEGHVTTTSTRTWVLPTYNNHLYKRLGESLQSNTYNGFPTPWGYFDFNRFHCHFSPRDWQRLINNNWGMRPKAMRVKIFNIQVKEVTTSNGETTAANNLTSTVQIFADSSYELPYVMDAGQEGSLPPFPNDVFMVPQYGYCGLVTGNTSQQQTDRNAFYCLEYFPSQMLRTGNNFEITYSFEKVPFHSMYAHSQSLDRLMNPLIDQYLWGLQSTTTGTTLNAGTATTNFTKLRPTNFSNFKKNWLPGPSIKQQGFSKTANQNYKIPATGSDSLIKYETHSTLDGRWSALTPGPPMATAGPADSKFSNSQLIFAGPKQNGNTATVPGTLIFTSEEELAATNATDTDMWGNLPGGDQSNSNLPTVDRLTALGAVPGMVWQNRDIYYQGPIWAKIPHTDGHFHPSPLIGGFGLKHPPPQIFIKNTPVPANPATTFSSTPVNSFITQYSTGQVSVQIDWEIQKERSKRWNPEVQFTSNYGQQNSLLWAPDAAGKYTEPRAIGTRYLTHHL

SEQ ID NO: 844 - protein, 734 aa, Artificial Sequence
  source: /note="Description of Artificial Sequence: Synthetic polypeptide"
MTDGYLPDWLEDNLSEGVREWWALQPGAPKPKANQQHQDNARGLVLPGYKYLGPGNGLDKGEPVNAADAAALEHDKAYDQQLKAGDNPYLKYNHADAEFQQRLQGDTSFGGNLGRAVFQAKKRVLEPLGLVEQAGETAPGKKRPLIESPQQPDSSTGIGKKGKQPAKKKLVFEDETGAGDGPPEGSTSGAMSDDSEMRAAAGGAAVEGGQGADGVGNASGDWHCDSTWSEGHVTTTSTRTWVLPTYNNHLYKRLGESLQSNTYNGFSTPWGYFDFNRFHCHFSPRDWQRLINNNWGMRPKAMRVKIFNIQVKEVTTSNGETTVANNLTSTVQIFADSSYELPYVMDAGQEGSLPPFPNDVFMVPQYGYRGLVTGNTSQQQTDRNAFYCLEYFPSQMLRTGNNFEITYSFEKVPFHSMYAHSQSLDRLMNPLIDQYLWGLQSTTTGTTLNAGTATTNFTKLRPTNFSNFKKNWLPGPSIKQQGFSKTANQNYKIPATGSDSLIKYETHSTLDGRWSALTPGPPMATAGPADSKFSNSQLIFAGPKQNGNTATVPGTLIFTSEEELAATNATDTDMWGNLPGGDQSNSNLPTVDRLTALGAVPGMVWQNRDIYYQGPIWAKIPHTDGHFHPSPLIGGFGLKHPPPQIFIKNTPVPANPATTFSSTPVNSFITQYSTGQVSVQIDWEIQKERSKRWNPEVQFTSNYGQQNSLLWAPDAAGKYTEPRAIGTRYLTHHL

SEQ ID NO: 845 - protein, 734 aa, Artificial Sequence
  source: /note="Description of Artificial Sequence: Synthetic polypeptide"
MTDGYLPDWLEDNLSEGVREWWALQPGAPKPKANQQHQDNARGLVLQGYKYLGPGNGLDKGEPVNAADAAALEHDKAYDQQLKAGDNPYLKYNHADAEFQQRLQGDTSFGGNLGRAVFQAKKRVLEPLGLVEQAGETAPGKKRPLIESPQQPDSSTGIGKKGKQPAKKKLVFEDETGAGDGPPEGSTSGAMSDDSEMRAAAGGAAVEGGQGADGVGNASGDWHCDSTRSEGHVTTTSTRTWVLPTYNNHLYKRLGESLQSNTYNGFSTPWGYFDFNRFHCHFSPRDWQRLINNNWGMRPKAMRVKIFNIQVKEVTTSNGETTVANNLTSTVQIFADSSYELPYVMDAGQEGSLPPFPNDVFMVPQYGYCGLVTGNTSQQQTDRNAFYCLEYFPSQMLRTGNNFEITYSFEKVPFHSMYAHSQSLDRLMNPLIDQYLWGLQSTTTGTTLNAGTATTNFTKLRPTNFSNFKKNWLPGPSIKQQGFSKTANQNYKIPATGSDSLIKYETHSTLDGRWSARTPGPPMATAGPADSKFSNSQLIFAGPKQNGNTATVPGTLIFTSEEELAATNATDTDMWGNLPGGDQSNSNLPTVDRLTALGAVPGMVWQNRDIYYQGPIWAKIPHTDGHFHPSPLIGGFGLKHPPPQIFIKNTPVPANPATTFSSTPVNSFITQYSTGQVSVQIDWEIQKERSKRWNPEVQFTSNYGQQNSLLWAPDAAGKYTEPRAIGTRYLTHHL

SEQ ID NO: 846 - protein, 724 aa, Artificial Sequence
  source: /note="Description of Artificial Sequence: Synthetic polypeptide"
MSFVDHPPDWLEEVGEGLREFLGLEAGPPKPKPNQQHQDQARGLVLPGYNYLGPGNGLDRGEPVNRADEVAREHDISYNEQLEAGDNPYLKYNHADAEFQERLADDTSFGGNLGKAVFQAKKRVLEPFGLVEEGAKTAPTGKRIDDHFPKRKKARTEEDSKPSTSSDAEAGPSGSQQLQIPAQPASSLGADTMSAGGGGPLGDNNQGADGVGNASGDWHCDSTWMGDRVVTKSTRTWVLPSYNNHQYREIKSGSVDGSNANAYFGYSTPWGYFDFNRFHSHWSPRDWQRLINNYWGFRPRSLRVKIFNIQVKEVTVQDSTTTIANNLTSTVQVFTDDDYQLPYVVGNGTEGCLPAFPPQVFTLPQYGYATLNRDNTENPTERSSFFCLEYFPSKMLRTGNNFEFTYNFEEVPFHSSFAPSQNLFKLANPLVDQYLYRFVSTNNTGGVQFNKNLAGRYANTYKNWFPGPMGRTQGWNLGSGVNRASVSAFATTNRMELEGASYQVPPQPNGMTNNLQGSNTYALENTMIFNSQPANPGTTATYLEGNMLITSESETQPVNRVAYNVGGQMATNNQSSTTAPATGTYNLQEIVPGSVWMERDVYLQGPIWAKIPETEAHFHPSPAMGGFGLKHPPPMMLIKNTPVPGNITSFSDVPVSSFITQYSTGQVTVEMEWELKKENSKRWNPEIQYTNNYNDPQFVDFAPDSTGEYRTTRPIGTRYLTRPL

SEQ ID NO: 847 - protein, 724 aa, Artificial Sequence
  source: /note="Description of Artificial Sequence: Synthetic polypeptide"
MSFVDHPPDWLEEVGEGLREFLGLEAGPPKPKPNQQHQDQARGLVLPGYNYLGPGNGLDRGEPVNRADEVAREHDISYNEQLEAGDNPYLKYNHADAEFQEKLADDTSSGGNLGKAVFQAKKRVLEPFGLVEEGAKTAPTGKRIDDHFPKRKKARTEEDSKPSTSSDAEAGPSGSQQLQIPAQPASSLGADTMSAGGGGPLGDNNQGADGVGNASGDWHCDSTWMGDRVVTKSTRTWVLPSYNNHQYREIKSGSVDGSNANAYFGYSTPWGYFDFNRFHSHWSPRDWQRLINNYWGFRPRSLRVKIFNIQVKEVTVQDSTTTIANNLTSTVQVFTDDDYQLPYVVGNGTEGCLPAFPPQVFTLPQYGYATLNRDNTENPTERSSFFCLEYFPSKMLRTGNNFEFTYNFEEVPFHSSFAPSQNLFKLANPLVDQYLYRFVSTNNTGGVQFNKNLAGRYANTYKNWFPGPMGRTQGWNLGSGVNRASVSAFATTNRMELEGASYQVPPQPNGMTNNLQGSNTYALENTMIFNSQPANPGTTATYLEGNMLITSESETQPVNRVAYNVGGQMATNNQSSTTAPATGTYNLQEIVPGSVWMERDVYLQGPIWAKIPETGAHFHPSPAMGGFGLKHPPPMMLIKNTPVPGNITSFSDVPVSSFITQYSTGQVTVEMEWELKKENSKRWNPEIQYTNNYNDPQFVDFAPDSTGEYRTTRPIGTRYLTRPL

SEQ ID NO: 848 - protein, 724 aa, Artificial Sequence
  source: /note="Description of Artificial Sequence: Synthetic polypeptide"
MSFVDHPPDWLEEVGEGLREFLGLEAGPPKPKPNQQHQDQARGLVLPGYNYLGPGNGLDRGEPVNRADEVAREHDISYNEQLEAGDNPYLKYNHADAEFQEKLADDTSFGGNLGKAVFQAKKRVLEPFGLVEEGAKTAPTGKRIDDHFPKRKKARTEEDSKPSTSSDAEAGPSGSQQLQIPAQPASSLGADTMSAGGGGPLGDNNQGADGVGNASGDWHCDSTWMGDRVVTKSTRTWVLPSYNNHQYREIKSGSVDGSNANAYFGYSTPWGYFDFNRFHSHWSPRDWQRLINNYWGFRPRSLRVKIFNIQVKEVTVQDSTTTIANNLTSTVQVFTDDDYQLPYVVGNGTEGCLPAFPPQVFTLPQYGYATLNRDNTENPTERSSFFCLEYFPSKMLRTGNNFEFTYNFEEVPFHSSFAPSQNLFKLANPLVDQYLYRFVSTNNTGGVQFNKNLAGRYANTYKNWFPGPMGRTQGWNLGSGVNRASVSAFATTNRMELEGASYQVPPQPNGMTNNLQGSNTYALENTMIFNSQPANPGTTATYLEGNMLITSESETQPVNRVAYNVGGQMATNNQSSTTAPATGTYNLQEIVPGSVWMERDVYLQGPIWAKIPETGAHFHPSPAMGGFGLKHPPPMMLIKSTPVPGNITSFSDVPVSSFITQYSTGQVTVEMEWELKKENSKRWNPEIQYTNNYNDPQFVDFAPDSTGEYRTTRPIGTRYLTRPL

SEQ ID NO: 849 - protein, 724 aa, Artificial Sequence
  source: /note="Description of Artificial Sequence: Synthetic polypeptide"
MSFVDHPPDWLEEVGEGLREFLGPEAGPPKPKPNQQHQDQARGLVLPGYNYLGPGNGLDRGEPVNRADEVAREHDISYNEQLEAGDNPYLKYNHADAEFQEKLADDTSFGGNLGKAVFQAKKRVLEPFGLVEEGAKTAPTGKRIDDHFPKRKKVRTEEDSKPSTSSDAEAGPSGSQQLQIPAQPASSLGADTMSAGGGGPLGDNNQGADGVGNASGDWHCDSTWMGDRVVTKSTRTWVPPSYNNHQYREIKSGSVDGSNANAYFGYSTPWGYFDFNRFHSHWSPRDWQRLINNYWGFRPRSLRVKIFNIQVKEVTVQDSTTTIANNLTSTVQVFTDDDYQLPYVVGNGTEGCLPAFPPQVFTLPQYGYATLNRDNTENPTERSSFFCLEYFPSKMLRTGNNFEFTYNFEEVPFHSSFAPSQNLFKLANPLVDQYLYRFVSTNNTGGVQFNKNLAGRYANTYKNWFPGPMGRTQGWNLGSGVNRASVSAFATTNRMELEGASYQVPPQPNGMTNNLQGSNTYALENTMIFNSQPANPGTTATYLEGNMLITSESETQPVNRVACNVGGQMATNNQSSTTAPATGTYNLQEIVPGSVWMERDVYLQGPIWAKIPETGAHFHPSPAMGGFGLKHPPPMMLIKNTPVPGNITSFSDVPVSSFITQYSTGQVTVEMEWELKKENSKRWNPEIQYTNNYNDPQFVDFAPDSTGEYRTTRPIGTRYLTRPL

SEQ ID NO: 850 - protein, 724 aa, Artificial Sequence
  source: /note="Description of Artificial Sequence: Synthetic polypeptide"
MSFVDHPPDWLEEVGEGLREFLGLEAGPPKPKPNQQHQDQARGLVLPGYNYLGPGNGLDRGEPVNRADEVAREHDISYNEQLEAGDNPYLKYNHADAEFQEKLADDTSFGGNLGKAVFQAKKRVLEPFGLVEEGAKTAPTGKRIDDHFPKRKKARTEEDSKPSTSSDAEAGPSGSQQLQIPAQPASSLGADTMSAGGGGPLGDNNQGADGVGNASGDWHCDSTWMGDRVVTKSTRTWVLPSYNNHQYREIKSGSVDGSNANAYFGYSTPWGYFDFNRFHSHWSPRDWQRLINNYWGFRPRSLRVKIFNIQVKEVTVQDSTTTIANNLTSTVQVFTDDDYQLPYVVGNGTEGCLPAFPPQVFTLPQYGYATLNRDNTENPTERSSFFCLEYFPSKMLRTGNNFEFTYNFEEVPFHSSFAPSQNLFKLANPLVDQYLYRFVSTNNTGGVQFNKNLAGRYANTYKNWFPGPMGRTQGWNLGSGVNRASVSAFATTNRMELEGASYQVPPQPNGMTNNLQGSNTYALENTMIFNSQPANPGTTATYLEGNMLITSESETQPVNRVAYNVGGQMATNNQSSTTAPATGAYNLQEIVPGSVWMERDVYLQGPIWAKIPETGAHFHPSPAMGGFGLKHPPPMMLIKNTPVPGNITSFSDVPVSSFITQYSTGQVTVEMEWELKKENSKRWNPEIQYTNNYNDPQFVDFAPDSTGEYRTTRPIGTRYLTRPL

SEQ ID NO: 851 - protein, 724 aa, Artificial Sequence
  source: /note="Description of Artificial Sequence: Synthetic polypeptide"
MSFVDHPPDWLEEVGEGLREFLGLEAGPPKPKPNQQHQDQARGLVLPGYNYLGPGNGLDRGEPVNRADGVAREHDISYNEQLEAGDNPYLKYNHADAEFQEKLADDTSFGGNLGKAVFQAKKRVLEPFGLVEEGAKTAPTGKRIDDHFPKRKKARTEEDSKPSTSSDAEAGPSGSQQLQIPAQPASSLGADTMSAGGGGPLGDNNQGADGVGNASGDWHCDSTWMGDRVVTKSTRTWVLPSYNNHQYREIKSGSVDGSNANAYFGYSTPWGYFDFNRFHSHWSPRDWQRLINNYWGFRPRSLRVKIFNIQVKEVTVQDSTTTIANNLTSTVQAFTDDDYQLPYVVGNGTEGCLPAFPPQVFTLPQYGYATLNRDNTENPTERSSFFCLEYFPSKMLRTGNNFEFTYNFEEVPFHSSFAPSQNLFKLANPLVDQYLYRFVSTNNTGGVQFNKNLAGRYANTYKNWFPGPMGRTQGWNLGSGVNRASVSAFATTNRMELEGASYQVPPQPNGMTNNLQGSNTYALENTMIFNSQPANPGTTATYLEGNMLITSESETQPVNRVAYNVGGQMATNNQSSTTAPATGTYNLQEIVPGSVWMERDVYLQGPIWAKIPETGAHFHPSPAMGGFGLKHPPPMMLIKNTPVPGNITSFSDVPVSSFITQYSTGQVTVEMEWELKKENSKRWNPEIQYTNNYNDPQFVDFAPDSTGEYRTTRPIGTRYLTRPL

SEQ ID NO: 852 - protein, 723 aa, Artificial Sequence
  source: /note="Description of Artificial Sequence: Synthetic polypeptide"
MSFVDHPPDWLEEVGEGLREFLGLEAGPPKPKPNQQHQDQARGLVLPGYNYLGPGNGLDRGEPVNRADEVAREHDISYNEQLEAGDNPYLKYNHADAEFQEKLADDTSFGGNLGKAVFQAKKRVLEPFGLVEEGAKTAPTGKRIDDHFPKRKKARTEEDSKPSTSSDAEAGPSGSQQLQIPAQPASSLGADTMSAGGGGPLGDNNQGADGVGNASGDWHCDSTWMGDRVVTKSTRTWVLPSYNNHQYREIKSGSVDGSNANAYFGYSTPWGYFDFNRFHSHWSPRDWQRLINNYWGFRPRSLRVKIFNIQVKEVTVQDSTTTIANNLTSTVQVFTDDDYQLPYVVGNGTEGCLPAFPPQVFTLPQYGYATLNRDNTENPTERSSFFCLEYFPSKMLRTGNNFEFTYNFEEVPFHSSFAPSQNLFKLANPLVDQYLYRFVSTNNTGGVQFNKNLAGRYANTYKNWFPGPMGRTQGWNLGSGVNRASVSAFATTNRMELEGASYVPPQPNGMTNNLQGSNTYALENTMIFNSQPANPGTTATYLEGNMLITSESETQPVNRVAYNVGGQMATNNQSSTTAPATGTYNLQEIVPGSVWMEGDVYLQGPIWAKIPETGAHFHPSPAMGGFGLKHPPPMMLIKNTPVPGNITSFSDVPVSSFITQYSTGQVTVEMEWELKKENSKRWNPEIQYTNNYNDPQFVDFAPDSTGEYRTTRPIGTRYLTRPL

SEQ ID NO: 853 - protein, 724 aa, Artificial Sequence
  source: /note="Description of Artificial Sequence: Synthetic polypeptide"
MSFVDHPPDWLEEVGEGLREFLGLEAGPPKPKPNQQHQDQARGLVLPGYNYLGPGNGLDRGEPVNRADEVAREHDISYNEQLEAGDNPYLKYNHADAEFQEKLADDTSFGGNLGKAVFQAKKRVLEPFGLVEEGAKTAPTGKRIDDHFPKRKKVRTEEDSKPSTSSDAEAGPSGSQQLQIPAQPASSLGADTMSAGGGGPLGDNNQGADGVGNASGDWHCDSTWMGDRVVTKSTRTWVLPSYNNHQYREIKSGSVDGSNANAYFGYSTPWGYFDFNRFHSHWSPRDWQRLINNYWGFRPRSLRVKIFNIQVKEVTVQDSTTTIANNLTSTVQVFTDDDYQLPYVVGNGTEGCLPAFPPQVFTLPQYGYATLNRDNTENPTERSSFFCLEYFPSKMLRTGNNFEFTYNFEEVPFHSSFAPSQNLFKLANPLVDQYLYRFVSTNNTGGVQFNKNLAGRYANTYKNWFPGPMGRTQGWNLGSGVNRASVSAFATTNRMELEGASYQVPPQPNGMTNNLQGSNTYALENTMIFNSQPANPGTTATYLEGNMLITSESETQPVNRVAYNVGGQMATNNQSSTTAPATGTYNLQEIVPGSVWMERDVYLQGPIWAKIPETGAHFHPSPAMGGFGLKHPPPMMLIKNTPVPGNITSFSDVPVSSFITQYSTGQVTVEMEWELKKENSERWNPEIQYTNNYNDPQFVDFAPDSTGEYRTTRPIGTRYLTRPL

SEQ ID NO: 854 - protein, 724 aa, Artificial Sequence
  source: /note="Description of Artificial Sequence: Synthetic polypeptide"
MSFVDHPPDWLEEVGEGLREFLGLEAGPPKPKPNQQHQDQARGLVLPGYNYLGPGNGLDRGEPVNRADEVAREHDISYSEQLEAGDNPYLKYNHADAEFQEKLADDTSFGGNLGKAVFQAKKRVLEPFGLVEEGAKTAPTGKRIDDHFPKRKKARTEEDSKPSTSSDAEAGPSGSQQLQIPAQPASSLGADTMSAGGGGPLGDNNQGADGVGNASGDWHCDSTWMGDRVVTKSTRTWVLPSYNNHQYREIKSGSVDGSNANAYFGYSTPWGYFDFNRFHSHWSPRDWQRLINNYWGFRPRSLRVKIFNIQVKEVTVQDSTTTIANNLTSTVQVFTDDDYQLPYVVGNGTEGCLPAFPPQVFTLPQYGYATLNRDNTENPTERSSFFCLEYFPSKMLRTGNNFEFTYNFEEVPFHSSFAPSQNLFKLANPLVDQYLYRFVSTNNTGGVQFNKNLAGRYANTYKNWFPGPMGRTQGWNLGSGVNRASVSAFATTNRMELEGASYQVPPQPNGMTNNLQGSNTYALENTMIFNSQPANPGTTATYLEGNMLITSESETQPVNRVAYNVGGQMATNNQSSTTAPATGTYNLQEIVPGSVWMERDVYLQGPIWAKIPETGAHFHPSPAMGGFGLKHPPPMMLIKNTPVPGNITSFSDVPVSSFITQYSTGQVTVEMEWELKKENSKRWNPEIQYTNNYNDPQFVDFAPDSTGEYRTARPIGTRYLTRPL

SEQ ID NO: 855 - protein, 724 aa, Artificial Sequence
  source: /note="Description of Artificial Sequence: Synthetic polypeptide"
MSFVDHPPDWLEEVGEGLREFLGPEAGPPKPKPNQQHQDQARGLVLPGYNYLGPGNGLDRGEPVNRADEVAREHDISYNEQLEAGDNPYLKYNHADAEFQEKLADDTSFGGNLGKAVFQAKKRVLEPFGLVEEGAKTAPTGKRIDDHFPKRKKARTEEDSKPSTSSDAEAGPSGSQQLQIPAQPASSLGADTMSAGGGGPLGDNNQGADGVGNASGDWHCDSTWMGDRVVTKSTRTWVLPSYNNHQYREIKSGSVDGSNANAYFGYSTPWGYFDFNRFHSHWSPRDWQRLINNYWGFRPRSLRVKIFNIQVKEVTVQDSTTTIANNLTSTVQVFTDDDYQLPYVVGNGTEGCLPAFPPQVFTLPQYGYATLNRDNTENPTERSSFFCLEYFPSKMLRTGNNFEFTYNFEEVPFHSSFAPSQNLFKLANPLVDQYLYRFVSTNNTGGVQFNKNLAGRYANTYKNWFPGPMGRTQGWNLGSGVNRASVSAFATTNRMELEGASYQVPPQPNGMTNNLQGSNTYALENTMIFNSQPANPGTTATYLEGNMLITSESETQPVNRVAYNVGGQMTTNNQSSTTAPATGTYNLQEIVPGSVWMERDVYPQGPIWAKIPETGAHFHPSPAMGGFGLKHPPPMMLIKNTPVPGNITSFSDVPVSSFITQYSTGQVTVEMEWELKKENSKRWNPEIQYTNNYNDPQFVDFAPDSTGEYRTTRPIGTRYLTRPL

SEQ ID NO: 856 - protein, 724 aa, Artificial Sequence
  source: /note="Description of Artificial Sequence: Synthetic polypeptide"
MSFVDHPPDWLEEVGEGLREFLGLEAGPPKPKPNQQHQDQARGLVLPGYNYLGPGNGLDRGEPVNRADEVAREHDISYNEQLEAGDNPYLKYNHADAEFQEKLADDTSFGGNLGKAVFQAKKRVLEPFGLVEEGAKTAPTGKRIDDHFPKRKKARTEEDSKPSTSSDAEAGPSGSQQLQIPAQPASSLGADTMSAGGGGPLGDNNQGADGVGNASGDWHCDSTWMGDRVVTKSTRTWVLPSYNNHQYREIKSGSVDGSNANAYFGYSTPWGYFDFNRFHSHWSPRDWQRLINNYWGFRPRSLRVKIFNIQVKEVTVQDSTTTIANNLTSTVQVFTDDDYQLPYVVGNGTEGCLPAFPPQVFTLPQYGYATLNRDNTENPTERSSFLCLEYFPSKMLRTGNNFEFTYNFEEVPFHSSFAPSQNLFKLANPLVDQYLYRFVSTNNTGGVQFNKNLAGRYANTYKNWFPGPMGRTQGWNLGSGVNRASVSAFATTNRMELEGASYQVPPQPNGMTNNLQGSNTYALENTMIFNSQPANPGTTATYLEGNMLITSESETQPVNRVAYNVGGQMATNNQSSTTAPATGTYNLQEIVPGSVWMKRDVYLQGPIWAKIPETGAHFHPSPAMGGFGLKHPPPMMLIKNTPVPGNITSFSDVPVSSFITQYSTGQVTVEMEWELKKENSKRWNPEIQYTNNYNDPQFVDFAPDSTGEYRTTRPIGTRYLTRPL

SEQ ID NO: 857 - protein, 724 aa, Artificial Sequence
  source: /note="Description of Artificial Sequence: Synthetic polypeptide"
MSFVDHPPDWLEEVGEGLREFLGLEAGPPKPKPNQQHQDQARGLVLPGYNYLGPGNGLDRGEPVNRADEVAREHDISYNEQLEAGDNPYLKYNHADAEFQEKLADDTSFGGNLGKAVFQAKKRVLEPFGLVEEGAKTAPTGKRIDDHFPKRKKARTEEDSKPSTPSDAEAGPSGSQQLQIPAQPASSLGADTMSAGGGGPLGDNNQGADGVGNASGDWHCDSTWMGDRVVTKSTRTWVLPSYNNHQYREIKSGSVDGSNANAYFGYSTPWGYFDFNRFHSHWSPRDWQRLINNYWGFRPRSLRVKIFNIQVKEVTVQDSTTTIANNLTSTVQVFTDDDYQLPYVVGNGTEGCLPAFPPQVFTLPQYGYATLNRDNTENPTERSSFFCLEYFPSKMLRTGNNFEFTYNFEEVPFHSSFAPSQNLFKLANPLVDQYLYRFVSTNNTGGVQFNKNLAGRYANTYKNWFPGPMGRTQGWNLGSGVNRASVSAFATTNRMELEGASYQVPPQPNGMTNNLQGSNTYALENTMIFNSQPANPGTTATYLEGNMLITSESETQPVNRVAYNVGGQMATNNQSSTTAPATGTYNLQEIVPGSVWMERDVYLQGPIWAKIPETGAHFHPSPAMGGFGLKHPPPMMLIKNTPVPGNITSFSDVPVSSFITQYSTGQVTVEMEWELKKENSKRWNPEIQYTNNYNDPQFVDFAPDSTGEYRTTRPIGTRYLTRPL

SEQ ID NO: 858 - protein, 724 aa, Artificial Sequence
  source: /note="Description of Artificial Sequence: Synthetic polypeptide"
MSFVDHPPDWLEEVGEGLREFLGLEAGPPKPKPNQQHQDQARGLVLPGYNYLGPGNGLDRGEPVNRADEVAREHDISYNEQLEAGDNPYLKYNHADAEFQEKLADDTSFGGNLGKAVFQAKKRVLEPFGLVEEGAKTAPTGKRIDDHFPKRKKARTEEDSKPSTSSDAEAGPSGSQQLQIPAQPASSLGADTMSAGGGGPLGDNNQGADGVGNASGDWHCDSTWMGDRVVTKSTRTWVLPSYNNHQYREIKSGSVDGSNANAYFGYSTPWGYFDFNRFHSHWSPRDWQRLINNYWGFRPRSLRVKIFNIQVKEVTVQDSTTTIANNLTSTVQVFTDDDYQLPYVVGNGTEGCLPAFPPQVFTLPQYGYATLNRDNTENPTERSSFFCLEYFPSKMLRTGNNFEFTYNFEEVPFHSSFAPSQNLFKLANPLVDQYLYRFVSTNNTGGVQFNKNLAGRYANTHKNWFPGPMGRTQGWNLGSGVNRASVSAFATTNRMELEGASYQVPPQSNGMTNNLRGSNTYALENTMIFNSQPANPGTTATYLEGNMLITSESETQPVNRVAYNVGGQMATNNQSSTTAPATGTYNLQEIVPGSVWMERDVYLQGPIWAKIPETGAHFHPSPAMGGFGLKHPPPMMLIKNTPVPGNITSFSDVPVSSFITQYSTGQVTVEMEWELKKENSKRWNPEIQYTNNYNDPQFVDFAPDSTGEYRTTRPIGTRYLTRPL

SEQ ID NO: 859 - protein, 724 aa, Artificial Sequence
  source: /note="Description of Artificial Sequence: Synthetic polypeptide"
MSFVDHPPDWLEEVGEGLREFLGLEAGPPKPKPNQQHQDQARGLVLPGYNYLGPGNGLDRGEPVNRADEVAREHDISYNEQLEAGDNPYLKYNHADAEFQEKLADDTSFGGNLGKAVFQAKKRVLEPFGLVEEGAKTAPTGKRIDDHFPKRKKARTEEDSKPSTSSDAEAGPSGSQQLQIPAQPASSLGADTMSAGGGGPLGDNNQGADGVGNASGDWHCDSTWMGDRVVTKSTRTWVLPSYNNHQYREIKSGSVDGSNANAYFGYSTPWGYFDFNRFHSHWSPRDWQRLINNYWGFRPRSLRVKIFNIQVKEVTVQDSTTTIANNLTSTVQVFTDDDYQLPYVVGNGTEGCLPAFPPQVFTLPQYGYATLNRDNTENPTERSSFFCLEYFPSKMLRTGNNFEFTYNFEEVPFHSSFAPSQNLFKLANPLVDQYLYRFVSTNNTGGVQFNKNLAGRYANTYKNWFPGPMGRTQGWNLGSGVNRASVSAFATTNRMELEGASYQVPPQPNGMTNNLQGSNTYALENTMIFNSQPANPGTTATYLEGNMLITSESETQPVNRVAYSVGGQMATNNQSSTTAPTTGTYNLQEIVPGSVWMERDVYLQGPIWAKIPETGAHFHPSPAMGGFRLKHPPPMMLIKNTPVPGNITSFSDVPVSSFITQYSTGQVTVEMEWELKKENSKRWNPEIQYTNNYNDPQFVDFAPDSTGEYRTTRPIGTRYLTRPL

SEQ ID NO: 860 - protein, 724 aa, Artificial Sequence
  source: /note="Description of Artificial Sequence: Synthetic polypeptide"
MSFVDHPPDWLEEVGEGLREFLGLEAGPPKPKPNQQHQDQARGLVLPGYNYLGPGNGLDRGEPVNRADEVAREHDISYNEQLEAGDNPYLKYNHADAEFQEKLADDTSFGGNLGKAVFQAKKRVLEPFGLVEEGAKTAPTGKRIDDHFPKRKKARTEEDSKPSTSSDAEAGPSGSQQLQIPAQPASSLGADTMSAGGGGPLGDNNQGADGVGNASGDWHCDSTWMGDRVVTKSTRTWVLPSYNNHQYREIKSGSVDGSNANAYFGYSTPWGYFDFNRFHSHWSPRDWQRLINNYWGFRPRSLRVKIFNIQVKEVTVQDSTTTIANNLTSTVQVFTDDDYQLPYVVGNGTEGCLPAFPPQVFTLPQYGYATLNRDNTENPTERSSFFCLEYFPSKMLRTGNNFEFTYNFEEVPFHSSFAPSQNLFKLANPLVDQYLYRFVSTNNTGGVQFNKNLAGRYANTYKNWFPGPMGRTQGWNLGSGVNRASVSAFAATNRMELEGASYQVPPQPNGMTNNLQGSNTYALENTMIFNSQPANPGTTATYLEGNMLITSESETQPVNRVAYNVGGQMATNNQSSTTAPATGTYNLQEIVPGGVWMERDVYLQGPIWAKIPETGAHFHPSPAMGGFGLKHPPPMMLIKNTPVPGNTTSFSDVPVSSFITQYSTGQVTVEMEWELKKENSKRWNPEIQYTNNYNDPQFVDFAPDSTGEYRTTRPIGTRYLTRPL

SEQ ID NO: 861 - protein, 724 aa, Artificial Sequence
  source: /note="Description of Artificial Sequence: Synthetic polypeptide"
MSFVDHPPDWLEEVGEGLREFLGLEAGPPKPKPNQQHQDQARGLVLPGYNYLGPGNGLDRGEPVNRADEVAREHDISYNEQLEAGDNPYLKYNHADAEFQEKLADDTSFGGNLGKVVFQAKKRVLEPFGLVEEGAKTAPTGKRIDDHFPKRKKARTEEDSKPSTSSDAEAGPSGSQQLQIPAQPASSLGADTMSAGGGGPLGGNNQGADGVGNASGDWHCDSTWMGDRVVTKSTRTWVLPSYNNHQYREIKSGSVDGSNANAYFGYSTPWGYFDFNRFHSHWGPRDWQRLINNYWGFRPRSLRVKIFNIQVKEVTVQDSTTTIANNLTSTVQVFTDDDYQLPYVVGNGTEGCLPAFPPQVFTLPQYGYATLNRDNTENPTERSSFFCLEYFPSKMLRTGNNFEFTYNFEEVPFHSSFAPSQNLFKLANPLVDQYLYRFVSTNNTGGVQFNKNLAGRYANTYKNWFPGPMGRTQGWNLGSGVNRASVSALATTNRMELEGASYQVPPQPNGMTNNLQGSNTYALENTMIFNSQPANPGTTATYLEGNMLITSESETQPVNRVAYNVGGQMATNNQSSTTAPATGTYNLQEIVPGSVWMERDVYLQGPIWAKIPETGAHFHPSPAMGGFGLKHPPPMMLIKNTPVPGNITSFSDVPVSSFITQYSTGQVTVEMEWELKKENSKRWNPEIQYTNNYNDPQFVDFAPDSTGEYRTTRPIGTRYLTRPL

SEQ ID NO: 862 - protein, 723 aa, Artificial Sequence
  source: /note="Description of Artificial Sequence: Synthetic polypeptide"
MSFVDHPPDWLEEVGEGLREFLGLEAGPPKPKPNQQHQDQARGLVLPGYNYLGPGNGLDRGEPVNRADEVAREHDISYNEQLEAGDNPYLKYNHADAEFQEKLADDTSFGGNLGKAVFQAKKRVLEPFGLVEEGAKTAPTGKRIDDHFPKRKKARTEEDSKPSTSSDAEAGPSGSQQLQIPAQPASSLGADTMSAGGGGPLGDNNQGADGVGNASGDWHCDSTWMGDRVVTKSTRTWVLPSYNNHQYREIKSGSVDGSNANAYFGYSTPWGYFDFNRFHSHWSPRDWQRLINNYWGFRPRSLRVKIFNIQVKEVTVQDSTTTIANNLTSTVQVFTDDDYQLPYVVGNGTEGCLPAFPPQVFTLPQYGYATLNRDNTENPTERSSFFCLEYFPSKMLRTGNNFEFTYNFEEVPFHSSFAPSQNLFKLANPLVDQYLYRFVSTNNTGGVQFNKNLAGRYANTYKNWFPGPMGRTQGWNLGSGVNRASVSAFATTNRMELEGASYQVPPQPNGMTNNLQGSNTYALENTMIFNSQPANPGTTATYLEGNMLITSESETQPVNRVAYNVGGQMATNNQSSTTAPATGTYNLQEIVPGSVWMERDVYLQGPIAKIPETGAHFHPSPAMGGFGLKHPPPMMLIKNTPVPGNITSFSDVPVSSFITQYSTGQVTVEMEWELKKENSKRWNPEIQYTNNYNDPQFVDFAPDSTGECRTTRPIGTRYLTRPL

SEQ ID NO: 863 - protein, 724 aa, Artificial Sequence
  source: /note="Description of Artificial Sequence: Synthetic polypeptide"
MSFVDHPPDWLEEVGEGLREFLGLEAGPPKPKPNQQHQDQARGLVLPGYNYLGPGNGLDRGEPVNRADEVAREHDISYNEQLEAGDNPYLKYNHADAEFQEKLADDTSFGGNLGKAVFQAKKRVLEPFGLVEEGAKTAPTGKRIDDHFPKRKKARTEEDSKPSTSSDAEAGPSGSQQLQIPAQPASSLGADTMSAGGGGPLGDNNQGADGVGNASGDWHCDSTWMGDRVVTKSTRTWVLPSYNNHQYREIKSGSVDGSNANAYFGYSTPWGYFDFNRFHSHWSPRDWQRLINNYWGFRPRSLRVKILNIQVKEVTVQDSTTTIANNLTSTVQVFTDDDYQLPYVVGNGTEGCLPAFPPQVFTLPQYGYATLNRDNTENPTERSSFFCLEYFPSKMLRTGNNFEFTYNFEEVPFHSSFAPSQNLFKLANPLVGQYLYRFVSTNNTGGVQFNENLAGRYANTYKNWFPGPMGRTQGWNLGSGVNRASVSAFATTNRMELEGASYQVPPQPNGMTNNLQGSNTYALENTMIFNSQPANPGTTATYLEGNMLITSESETQPVNRVAYNVGGQMATNNQSSTTAPATGTYNLQEIVPGSVWMERDVYLQGPIWAKIPETGAHFHPSPAMGGFGLKHPPPMMLIKNTPVPGNITSFSDVPVSSFITQYSTGQATVEMEWELKKENSKRWNPEIQYTNNYNDPQFVDFAPDSTGEYRTTRPIGTRYLTRPL

SEQ ID NO: 864 - protein, 724 aa, Artificial Sequence
  source: /note="Description of Artificial Sequence: Synthetic polypeptide"
MSFVDHPPDWLEEVGEGLREFLGLEAGPPKPKPNQQHQDQARGLVLPGYNYLGPGNGLDRGEPVNRADEVAREHDISYNEQLEAGDNPYLKYNHADAEFQEKLADDTSFGGNLGKAVFQAKKRVLEPFGLVEEGAKTAPTGKRIDDHFPKRKKARTEEDSKPSTSSDAEAGPSGSQQLQIPAQPASSLGADTMSAGGGGPLGDNNQGADGVGNASGDWHCDSTWMGDRVVTKSTRTWVLPSYNNHQYREIKSGSVDGSNANAYFGYSTPWGYFDFNRFHSHWSPRDWQRLINNYWGFRPRSLRVKIFNIQVKEVTVQDSTTIIANNLTSTVQVFTDDDYQLPYVVGNGTEGCLPAFPPQVFTLPQYGYATLNRDNTENPTERSSFFCLEYFPSKMLRTGNNFEFTYNFEEVPFHSSFAPSQNLFKLANPLVDQYLYRFVSTNNTGGVQFNKNLAGRYANTYKNWFPGPMGRTQGWNLGSGVNRASVSAFATTNRMELEGASYQVPPQPNGMTNNLQGSNTYALENTMIFNSQPANPGTTATYLEGNMLITSESETQPVNRVAYNVGGQMATNNQSSTTAPATGTYNLQEIVPGSVWMERDVYLQGPIWAKIPETGAHFHPSPAMGGFGLKHPPPMMLIKNTPVPGNITSFSDVPVSSFITQYSTGQVTVEMEWELKKENSKRWNPEIQYTNNYNDPQFVDFAPDSTGEYRTTRPIGTRYLTRPL

SEQ ID NO: 865 - protein, 724 aa, Artificial Sequence
  source: /note="Description of Artificial Sequence: Synthetic polypeptide"
MSFVDHPPDWLEEVGEGLREFLGLEAGPPKPKPNQQHQDQARGLVLPGYNYLGPGNGLDRGEPVNRADEVAREHDISYNEQLEAGDNPYLKYNHADAEFQEKLADDTSFGGNLGKAVFQAKKRVLEPFGLVEEGAKTAPTGKRIDDHFPKRKKARTEEDSKPSTSSDAEAGPSGSQQLQIPAQPASSLGADTMSAGGGGPLGDNNQGADGVGNASGDWHCDSTWMGDRVVTKSTRTWVLPSYNNHQYREIKSGSVDGSNANAYFGYSTPWGYFDFNRFHSHWSPRDWQRLINNYWGFRPRSLRVKIFNIQVKEVTVQDSTTTIANNLTSTVQVFTDDDYQLPYVVGNGTEGCLPAFPPQVFTLPQYGYATLNRDNTENPTERSSFFCLEYFPSKMLRTGNNFEFTYNFEEVPFHSSFAPSQNLFKLANPLVDQYLYRFVSTNNTGGVQFNKNLAGRYANTYKNWFPGPMGRTQGWNLGSGVNRASVSAFATTNRMELEGASYQVPPQPNGMTNNLQGSNTYALENTMIFNSQPANPGTTATYLEGNMLITSESETQPVNRVAYNVGGQMATNNQSSTTAPATGTYNLQEIVPGSVWMERDVYLQGPIWAKIPETGAHFHPSPAMGGFGLKHPPPMMLIKNTPVPGNITSLSDVPVSSFITQYSTGQVTVEMEWELKKENSKRWNPEIQYTNNYNDPQFVDFAPDSTGEYRTTRPIGTRYLTRPL

SEQ ID NO: 866 - protein, 724 aa, Artificial Sequence
  source: /note="Description of Artificial Sequence: Synthetic polypeptide"
MSFVDHPPDWLEEVGEGLREFLGLEAGPPKPKPNQQHQDQARGLVLPGYNYLGPGNGLDRGEPANRADEVAREHDISYNEQLEAGDNPYLKYNHAGAEFQEKLADDTSFGGNLGKAVFQAKKRVLEPFGLVEEGAKTAPTGKRIDDHFPKRKKARTEEDSKPSTSSDAEAGPSGSQQLQIPAQPASSLGADTMSAGGGGPLGDNNQGADGVGNASGDWHCDSTWMGDRVVTKSTRTWVLPGYNNHQYREIKSGSVDGSNANAYFGYSTPWGYFDFNRFHSHWSPRDWQRLINNYWGFRPRSLRVKIFNIQVKEVTVQDSTTTIANNLTSTVQVFTDDDYQLPYVVGNGTEGCLPAFPPQVFTLPQYGYATLNRDNTENPTERSSFFCLEYFPSKMLRTGNNFEFTYNFEEVPFHSSFAPSQNLFKLANPLVDQYLYRFVSTNNTGGVQFNKNLAGRYANTYKNWFPGPMGRTQGWNLGSGVNRASVSAFATTNRMELEGASYQVPPQPNGMTNNLQGSNTYALENTMIFNSQPANPGTTATYLEGNMLITSESETQPVNRVAYNVGGQMATNNQSSTTAPATGTYNLQEIVPGSVWMERDVYLQGPIWAKIPETGAHFHPSPAMGGFGLKHPPPMMLIKNTPVPGNITSFSDVPVSSFITQYSTGQVTVEMEWELKKENSKRWNPEIQYTNNYNDPQFVDFAPDSTGEYRTTRPIGTRYLTRPL

SEQ ID NO: 867 - protein, 724 aa, Artificial Sequence
  source: /note="Description of Artificial Sequence: Synthetic polypeptide"
MSFVDHPPDWLEEVGEGLREFLGLEAGPPKPKPNQQHQDQARGLVLPGYNYLGPGNGLDRGEPVNRADEVAREHDISYNEQLEAGDNPYLKYNHADAEFQEKLADDTSFGGNLGKAVFQAKKRVLEPFGLVEEGAKTAPTGKRIDDHFPKRKKARTEEDSKPPTSSDAEAGPSGSQQLQIPAQPASSLGADTMSAGGGGPLGDNNQGADGVGNASGDWHCDSTWMGDRVVTKSTRTWVLPSYNNHQYREIKSGSVDGSNANAYFGYSTPWGYFDFNRFHSHWSPRDWQRLINNYWGFRPRSLRVKIFNIQVKEVTVQDSATTIANNLTSTVQVFTDDDYQLPYVVGNGTEGCLPAFPPQVFTLPQYGYATLNRDNTENPTERSSFFCLEYFPSKMLRTGNNFEFTYNFEEVPFHSSFAPSQNLFKLANPLVDQYLYRFVSTNNTGGVQFNKNLAGRYANTYKNWFPGPMGRTQGWNLGSGVNRASVSAFATTNRMELEGASYQVPPQPNGMTNNLQGSNTYALENTMIFNSQPANPGTTATYLEGNMLITSESETQPVNRVAYNVGGQMATNNQSSTTAPATGTYNLQEIVPGSVWMERDVYLQGPIWAKIPETGAHFHPSPAMGGFGLKHPPPMMLIKNTPVPGNITSFSDVPVSSFITQYSTGQVTVEMEWELKKENSKRWNPEIQYTNNYNDPQFVDFAPDSTGEYRTTRPIGTRYLTRPL

SEQ ID NO: 868 - protein, 724 aa, Artificial Sequence
  source: /note="Description of Artificial Sequence: Synthetic polypeptide"
MSFVDHPPDWLEEVGEGLREFLGLEAGPPKPKPNQQHQDQARGLVLPGYNYLGPGNGLDRGEPVNRADEVAREHDISYNEQLEAGDNPYLKYNHADAEFQEKLADDTSFGGNLGKAVFQAKKRVLEPFGLVEEGAKTAPTGKRIDDHFPKRKKARTEEDSKPSTSSDAEAGPSGSQQPQIPAQPASSLGADTMSAGGGGPLGDNNQGADGVGNASGDWHCDSTWMGDRVVTKSTRTWVLPSYNNHQYREIKSGSVDGSNANAYFGYSTPWGYFDFNRFHSHWSPRDWQRLINNYWGFRPRSLRVKIFNIQVKEVTVQDSTTTIANNLTSTVQVFTDDDYQLPYVVGNGTEGCLPAFPPQVFTLPQYGYATLNRDNTENPTERSSFFCLEYFPSKMLRTGNNFEFTYNFEEVPFHSSFAPSQNLFKLANPLVDQYLYRFVSTNNTGGVQFNKNLAGRYANTYKNWFPGPMGRTQGWNLGSGVNRASVSAFATTNRMELEGASYQVPPQPNGMTNNLQGSNTYALENTMIFNSQPANPGTTATYLEGNMLITSESETQPVNRVAYNVGGQMATNNQSSTTAPATGTYNLQEIVPGSVWMERDVYLQGPIWAKIPETGAHFHPSPAMGGFGLKHPPPMMLIKNTPAPGNITSFSDVPVSSFITQYSTGQVTVEMEWELKKENSKRWNPEIQYTNNYNDPQFVDFAPDSTGEYRTTRPIGTRYLTRPL

SEQ ID NO: 869 - protein, 724 aa, Artificial Sequence
  source: /note="Description of Artificial Sequence: Synthetic polypeptide"
MSFVDHPPDWLEEVGEGLREFLGLEAGPPKPKPNQQHQDQARGLVLPGYNYLGPGNGLDRGEPVNRADEVAREHDISYNEQLEAGDNPYLKYNHADAEFQEKLADDTSFGGNLGKAVFQAKKRVLEPFGLVEEGAKTAPTGKRIDDHFPKRKKARTEEDSKPPTSSDAEAGPSGSQQLQIPAQPASSLGADTMSAGGGGPLGDNNQGADGVGNASGDWHCDSTWMGDRVVTKSTRTWVLPSYNNHQYREIKSGSVDGSNANAYFGYSTPWGYFDFNRFHSHWSPRDWQRLINNYWGFRPRSLRVKIFNIQVKEVTVQDSTTTIANNLTSTVQVFTDDDYQLPYVVGNGTEGCLPAFPPQVFTLPQYGYATLNRDNTENPTERSSFFCLEYFPSKMLRTGNNFEFTYNFEEVPFHSSFAPSQNLFKLANPLVDQYLYRFVSTNNTGGVQFNKNLAGRYANTYKNWFPGPMGRTQGWNLGSGVNRASVSAFATTNRMELEGASYQVPPQPNGMTNNLQGSNTYALENTMIFNSQPANPGTTATYLEGNMLITSESETQPVNRVAYNVGGQMATNNQSSTTAPATGTYNLQEIVPGSVWMERDVYLQGPIWAKIPETGAHFHPSPAMGGFGLKHPPPMMLIKNTPVPGNITSFSDVPVSSFITQYSTGQVTVEMEWELKKENSKRWNPEIQYTNNYNDPQFVDFAPDSTGEYRTTRPIGTRYLTRPL

SEQ ID NO: 870 - protein, 724 aa, Artificial Sequence
  source: /note="Description of Artificial Sequence: Synthetic polypeptide"
MSFVDHPPDWLEEVGEGLREFLGLEAGPPKPKPNQQHQDQARGLVLPGYNYLGPGNGLDRGEPVNRADEVAREHDISYNEQLEAGDNPYLKYNHADAEFQEKLADDTSFGGNLGKAVFQAKKRVLEPFGLVEEGAKTAPTGKRIDDHFPKRKKARTEEDSKPPTSSDAEAGPSGSQQLQIPAQPASSLGADTMSAGGGGPLGDNNQGADGVGNASGDWHCDSTWMGDRVVTKSTRTWVPPSYNNHQYREIKSGSVDGSNANAYFGYSTPWGYFDFNRFHSHWSPRDWQRLINNYWGFRPRSLRVKIFNIQVKEVTVQDSTTTIANNLTSTVQVFTDDDYQLPYVVGNGTEGCLPAFPPQVFTLPQYGYATLNRDNTENPTERSSFFCLEYFPSKMLRTGNNFEFTYNFEEVPFHSSFAPSQNLFKLANPLVDQYLYRFVSTNNTGGVQFNKNLAGRYANTYKNWFPGPMGRTQGWNLGSGVNRASVSAFATTNRMELEGASYQVPPQPNGMTNNLQGSNTYALENTMIFNSQPANPGTTATYLEGNMLITSESETQPVNRVAYNVGGQMATNNQSSTTAPATGTYNLQEIVPGSVWMERDVYLQGPIWAKIPETGAHFHPSPAMGGFGLKHPPPMMLIKNTPVPGNITSFSDVPVSSFITQYSTGQVAVEMEWELKKENSKRWNPEIQYTNNYNDPQFVDFAPDSTGEYRTTRPIGTRYLTRPL

SEQ ID NO: 871 - protein, 724 aa, Artificial Sequence
  source: /note="Description of Artificial Sequence: Synthetic polypeptide"
MSFVDHPPDWLEEVGEGLREFLGLEAGPPKPKPNQQHQDQARGLVLPGYNYLGPGNGLDRGEPVNRADEVAREHDISYNEQLEAGDNPYLKYNHADAEFQEKLADDTSFGGNLGKAVFQAKKRVLEPFGLVEEGAKTAPTGKRIDDHFPKRKKARTEEDSKPSTSSDAEAGPSGSQQLQIPAQPASSLGADTMSAGGGGPLGDNNQGADGVGNASGDWHCDSTWMGDRVVTKSTRTWVLPSYNNHQYREIKSGSVDGSNANAYFGYSTPWGYFDFNRFHSHWSPRDWQRLINNYWGFRPRSLRVKIFNIQVKEVTVQDSTTTIANNLTSTVQVFTDDDYQLPYVVGNGTEGCLPAFPPQVFTLPQYGYATLNRDNTENPTERSSFFCLEYFPSKMLRTGNNFEFTYNFEEVPFHSSFAPSQNLFKLANPLVDQYLYRFVSTNNTGGVQFNKNLAGRYANTYKNWFPGPMGRTQGWNLGSGVNRASVSAFATTNRMELEGASYQVPPQPNGMTNNLQGSNTYALENTMIFNSQPANPGTTATYLEGNMLITSESETQPVNRVAYNVGGQMATNNQSSTTAPATGTYNLQEIVPGSVWMERDVYLQGPIWAKIPETGAHFHPSPAMGGFGLKHPPPMMLIKNTPAPGNITSFSDVPVSSFITQYSTGQVTVEMEWELKKENSKRWNPEIQYTNNYNDPQFVDFAPDSTGEYRTTRPIGTRYLTRPL

SEQ ID NO: 872 - protein, 724 aa, Artificial Sequence
  source: /note="Description of Artificial Sequence: Synthetic polypeptide"
MSFVDHPPDWLEEVGEGLREFLGLEAGPPKPKPNQQHQDQARGLVLPGYNYLGPGNGLDRGEPVNRADEVAREHDISYNEQLEAGDNPYLKYNHADAEFQEKLADDTSFGGNLGKAVFQAKKRVLEPFGLAEEGAKTAPTGKRIDDHFPKRKKARTEEDSKPSTSSDAEAGPSGSQQLQIPAQPASSLGADTMSAGGGGPLGDNNQGADGVGNASGDWHCDSTWMGDRVVTKSTRTWVLPSYNNHQYREIKSGSVDGSNANAYFGYSTPWGYFDFNRFHSHWSPRDWQRLINNYWGFRPRSLRAKIFNIQVKEVTVQDSTTTIANNLTSTVQVFTDDDYQLPYVVGNGTEGCLPAFPPQVFTLPQYGYATLNRDNTENPTERSSFFCLEYFPSKMLRTGNNLEFTYNFEEVPFHSSFAPSQNLFKLANPLVDQYLYRFVSTNNTGGVQFNKNLAGRYANTYKNWFPGPMGRTQGWNLGSGVNRASVSAFATTNRMELEGASYQVPPQPNGMTNNLQGSNTYALENTMIFNSQPANPGTTATYLEGNMLITSESETQPVNRVVHNVGGQMATNNQSSTTAPATGTYNLQEIVPGSVWMERDVYLQGPIWAKIPETGAHFHPSPAMGGFGLKHPPPMMLIKNTPVPGNITSFSDVPVSSFITQYSTGQVTVEMEWELKKENSKRWNPEIQYTNNYNDPQFVDFAPDSTGEYRTTRPIGTRYLTRPL

SEQ ID NO: 873 - protein, 724 aa, Artificial Sequence
  source: /note="Description of Artificial Sequence: Synthetic polypeptide"
MSFVDHPPDWLEEVGEGLREFLGLEAGPPKPKPNQQHQDQARGLVLPGYNYLGPGNGLDRGEPVNRADEVAREHDISYNEQLEAGDNPYLKYNHADAEFQEKLADDTSFGGNLGKAVFQAKKRVLEPFGLVEEGAKTAPTGKRIDDHFPKRKKARTEEDSKPSTSSDAEAGPSGSQQLQIPAQPASSLGADTMSAGGGGPLGDNNQGADGVGNASGDWHCDSTWMGDRVVTKSTRTWVLPSYNNHQYREIKSGSVDGGNANAYFGYSTPWGYFDFNRFHSHWSPRDWQRLINNYWGFRPRSLRVKIFNIQVKEVTVQDSTTTIANNLTSTVQVFTDDDYQLPYVVGNGTEGCLPAFPPQVFTLPQYGYATLNRDNTENPTERSSFFCLEYFPSKMLRTGNNFEFTYNFEEVPFHSSFAPSQNLFKLANPLVDQYLYRFVSTNNTGGVQFNKNLAGRYANTYKNWFPGPMGRTQGWNLGSGVNRASVSAFATTNRMELEGASYQVPPQPNGMTNNLQGSNTYALENTMIFNSQPANPGTTATYLEGNMLITSESETQPVNRVAYNVGGQMATNNQSSTTAPATGTYNLQEIVPGSVWMERDVYLQGPIWAKIPETGAHFHPSPAMGGFGLKHPPPMMLIKNTPAPGNITSFSDVPVSSFITQYSTGQVTVEMEWELKKGNSKRWNPEIQYTNNYNDPQFVDFAPDSTGEYRTTRPIGTRYLTRPL

SEQ ID NO: 874 - protein, 724 aa, Artificial Sequence
  source: /note="Description of Artificial Sequence: Synthetic polypeptide"
MSFVDHPPDWLEEVGEGLREFLGLEAGPPKPKPNQQHQDQARGLVLPGYNYLGPGNGLDRGEPVNRADEVAREHDISYNEQLEAGDNPYLKYNHADAEFQEKLADDTSFGGNLGKAVFQAKKRVLEPFGLVEEGAKTAPTGKRIDDHFPKRKKARTEEDSKPSTSSDAEAGPSGSQQLQIPAQPASSLGADTMSAGGGGPLGDNNQGADGVGNASGDWHCDSTWMGDRVVTKSTRTWVLPSYNNHQYREIKSGSVDGSNANAYFGYSTPWGYFDFNRFHSHWSPRDWQRLINNYWGFRPRSLRVKIFNIQVKEVTVQDSTTTIANNLTSTVQVFTDDDYQLPYVVGNGTEGCLPAFPPQVFTLPQYGYATLNRDNTENPTERSSFFCLEYFPSKMLRTGNNFEFTYNFEEVPFHSSFAPSQNLFKLANPLVDQYLYRFVSTNNTGGVQFNKNLAGRYANTYKNWFPGPMGRTQGWNLGSGVNRASVSAFATTNRMELEGASYQVPPQPNGMTNNLQGSNTYALENTMIFNSQPANPGTTATYLEGNMLITSESETQPVNRVAYNVGGQMATNNQSSTTAPATGTYNLQEIVPGSVWMERDVYLQGPIWAKIPETGVHFHPSPAMGGFGLKHPPPMMLIKNTPVPGNITSFSDVPVSSFITQYSTGQVTVEMEWELKKENSKRWNPEIQYTNNYNDPQFVDFAPDSTGEYRTTRPIGTRYLTRPL

SEQ ID NO: 875 - protein, 724 aa, Artificial Sequence
  source: /note="Description of Artificial Sequence: Synthetic polypeptide"
  MOD_RES (551)..(551): Any naturally occurring amino acid
MSFVDHPPDWLEEVGEGLREFLGLEAGPPKPKPNQQHQDQARGLVLPGYNYLGPGNGLDRGEPVNRADEVAREHDISYNEQLEAGDNPYLKYNHADAEFQEKLADDTSFGGNLGKAVFQAKKRVLEPFGLVEEGAKTAPTGKRIDDHFPKRKKARTEEDSKPSTSSDAEAGPSGSQQLQIPAQPASSLGADTMSAGGGGPLGDNNQGADGVGNASGDWHCDSTWMGDRVVTKSTRTWVLPSYNNHQYREIKSGSVDGSNANAYFGYSTPWGYFDFNRFHSHWSPRDWQRLINNYWGFRPRSLRVKIFNIQVKEVTVQDSTTTIANNLTSTVQVFTDDDYQLPYVVGNGTEGCLPAFPPQVFTLPQYGYATLNRDNTENPTERSSFFCLEYFPSKMLRTGNNFEFTYNFEEVPFHSSFAPSQNLFKLANPLVDQYLYRFVSTNNTGGVQFNKNLAGRYANTYKNWFPGPMGRTQGWNLGSGVNRASVSAFATTNRMELEGASYQVPPQPNGMTNNLQGSNTYALENTMIFNSQPANPGTTATYLEGSMLITXESETQPVNRVAYNVGGQMATNNQSSTTAPATGTYNLQEIVPGSVWMERDVYLQGPIWAKIPETGAHFHPSPAMGGFGLKHPPPMMLIKNTPVPGNITSFSDVPVSSFITQYSTGQVTVEMEWELKKENSKRWNPEIQYTNNYNDPQFVDFAPDSTGEYRTTRPIGTRYLTRPL

SEQ ID NO: 876 - protein, 736 aa, Artificial Sequence; identical to SEQ ID NO: 50
  source: /note="Description of Artificial Sequence: Synthetic polypeptide"

SEQ ID NO: 877 - protein, 734 aa, Artificial Sequence; identical to SEQ ID NO: 68
  source: /note="Description of Artificial Sequence: Synthetic polypeptide"

SEQ ID NO: 878 - protein, 723 aa, Artificial Sequence
  source: /note="Description of Artificial Sequence: Synthetic polypeptide"
MSFVDHPPDWLEEVGEGLREFLGLEAGPPKPKPNQQHQDQARGLVLPGYNYLGPGNGLDRGEPVNRADEVAREHDISYNEQLEAGDNPYLKYNHADAEFQEKLADDTSFGGNLGKAVFQAKKRVLEPFGLVEEGAKTAPTGKRIDDHFPKRKKARTEEDSKPSTSSDAEAGPSGSQQLQIPAQPASSLGADTMSAGGGPLGDNNQGADGVGNASGDWHCDSTWMGDRVVTKSTRTWVLPSYNNHQYREIKSGSVDGSNANAYFGYSTPWGYFDFNRFHSHWSPRDWQRLINNYWGFRPRSLRVKIFNIQVKEVTVQDSTTTIANNLTSTVQVFTDDDYQLPYVVGNGTEGCLPAFPPQVFTLPQYGYATLNRDNTENPTERSSFFCLEYFPSKMLRTGNNFEFTYNFEEVPFHSSFAPSQNLFKLANPLVDQYLYRFVSTNNTGGVQFNKNLAGRYANTYKNWFPGPMGRTQGWNLGSGVNRASVSAFATTNRMELEGASYQVPPQPNGMTNNLQGSNTYALENTMIFNSQPANPGTTATYLEGNMLITSESETQPVNRVAYNVGGQMATNNQSSTTAPATGTYNLQEIVPGSVWMERDVYLQGPIWAKIPETGAHFHPSPAMGGFGLKHPPPMMLIKNTPVPGNITSFSDVPVSSFITQYSTGQVTVEMEWELKKENSKRWNPEIQYTNNYNDPQFVDFAPDSTGEYRTTRPIGTRYLTRPL

SEQ ID NO: 879 - protein, 534 aa, Artificial Sequence
  source: /note="Description of Artificial Sequence: Synthetic polypeptide"
MAEGGGGAMGDSSGGADGVGNASGNWHCDSQWMGNTVITKTTRTWVLPSYNNHIYKAITSGTSQDANVQYAGYSTPWGYFDFNRFHCHFSPRDWQRLINNHWGIRPKSLKFKIFNVQVKEVTTQDQTKTIANNLTSTIQVFTDDEHQLPYVLGSATEGTMPPFPSDVYALPQYGYCTMHTNQNGARFNDRSAFYCLEYFPSQMLRTGNNFEFTFDFEEVPFHSMFAHSQDLDRLMNPLVDQYLWNFNEVDSSRNAQFKKAVKGAYGTMGRNWLPGPKFLDQRVRAYTGGTDNYANWNIWSNGNKVNLKDRQYLLQPGPVSATYTEGEASSLPAQNILGIAKDPYRSGSTTAGISDIMVTEEQEVAPTNGVGWKPYGRTVTNEQNTTTAPTSSDLDVLGALPGMVWQNRDIYLQGPIGAKIPKTDGKFHPSPNLGGFGLHNPPPQVFIKNTPVPADPPVEYVHQKWNSYITQYSTGQCTVEMVWELRKENSKRWNPEIQFTSNFSNRTSIMFAPNETGGYVEDRLIGTRYLTQNL

SEQ ID NO: 880 - protein, 554 aa, Artificial Sequence
  source: /note="Description of Artificial Sequence: Synthetic polypeptide"
MTSVNSAEASTGAGGGGSNPVKSMWSEGATFSANSVTCTFSRQFLIPYDPEHHYKVFSPAASSCHNASGKEAKVCTISPIMGYSTPWRYLDFNALNLFFSPLEFQHLIENYGSIAPDALTVTISEIAVKDVTDKTGGGVQVTDSTTGRLCMLVDHEYKYPYVLGQGQDTLAPELPIWVYFPPQYAYLTVGDVNTQGISGDSKKLASEESAFYVLEHSSFQLLGTGGTATMSYKFPPVPPENLEGCSQHFYEMYNPLYGSRLGVPDTLGGDPKFRSLTHEDHAIQPQNFMPGPLVNSVSTKEGDSFNTGAGKALTGLSTGTSQNTRISLRPGPVSQPYHHWDTDKYVTGINAISHGQTTYGNAEDKEYQQGVGRFPNEKEQLKQLQGLNMHTYFPNKGTQQYTDQIERPLMVGSVWNRRALHYESQLWSKIPNLDDSFKTQFAALGGWGLHQPPPQIFLKILPQSGPIGGIKSMGITTLVQYAVGIMTVTMTFKLGPRKATGRWNPQPGVYPPHAAGHLPYVLYDPTATDAKQHHRHGYEKPEELWTAKSRVHPL

SEQ ID NO: 881 - protein, 587 aa, Artificial Sequence
  source: /note="Description of Artificial Sequence: Synthetic polypeptide"
MSDGTSQPDGGNAVHSAARVERAADGPGGSGGGGSGGGGVGVSTGSYDNQTHYRFLGDGWVEITALATRLVHLNMPKSENYCRIRVHNTTDTSVKGNMAKDDAHEQIWTPWSLVDANAWGVWLQPSDWQYICNTMSQLNLVSLDQEIFNVVLKTVTEQDSGGQAIKIYNNDLTACMMVAVDSNNILPYTPAANSMETLGFYPWKPTIASPYRYYFCVDRDLSVTYENQEGTIEHNVMGTPKGMNSQFFTIENTQQITLLRTGDEFATGTYYFDTNPVKLTHTWQTNRQLGQPPLLSTFPEADTDAGTLTAQGSRHGATQMEVNWVSEAIRTRPAQVGFCQPHNDFEASRAGPFAAPKVPADVTQGMDREANGSVRYSYGKQHGENWAAHGPAPERYTWDETNFGSGRDTRDGFIQSAPLVVPPPLNGILTNANPIGTKNDIHFSNVFNSYGPLTTFSHPSPVYPQGQIWDKELDLEHKPRLHITAPFVCKNNAPGQMLVRLGPNLTDQYDPNGATLSRIVTYGTFFWKGKLTMRAKLRANTTWNPVYQVSVEDNGNSYMSVTKWLPTATGNMQSVPLITRPVARNTY

SEQ ID NO: 882 - protein, 584 aa, Artificial Sequence
  source: /note="Description of Artificial Sequence: Synthetic polypeptide"
MSDGAVQPDGGQPAVRNERATGSGNGSGGGGGGGSGGVGISTGTFNNQTEFKFLENGWVEITANSSRLVHLNMPESENYKRVVVNNMDKTAVKGNMALDDIHVEIVTPWSLVDANAWGVWFNPGDWQLIVNTMSELHLVSFEQEIFNVVLKTVSESATQPPTKVYNNDLTASLMVALDSNNTMPFTPAAMRSETLGFYPWKPTIPTPWRYYFQWDRTLIPSHTGTSGTPTNVYHGTDPDDVQFYTIENSVPVHLLRTGDEFATGTFFFDCKPCRLTHTWQTNRALGLPPFLNSLPQSEGATNFGDIGVQQDKRRGVTQMGNTDYITEATIMRPAEVGYSAPYYSFEASTQGPFKTPIAAGRGGAQTDENQAADGDPRYAFGRQHGQKTTTTGETPERFTYIAHQDTGRYPEGDWIQNINFNLPVTNDNVLLPTDPIGGKTGINYTNIFNTYGPLTALNNVPPVYPNGQIWDKEFDTDLKPRLHINAPFVCQNNCPGQLFVKVAPNLTNQYDPDASANMSRIVTYSDFWWKGKLVFKAKLRASHTWNPIQQMSINVDNQFNYVPNNIGAMKIVYEKSQLAPRKLY

SEQ ID NO: 883 - protein, 548 aa, Artificial Sequence
  source: /note="Description of Artificial Sequence: Synthetic polypeptide"
GVGISTGTFNNQTEFKFLENGWVEITANSSRLVHLNMPESENYRRVVVNNMDKTAVNGNMALDDIHAQIVTPWSLVDANAWGVWFNPGDWQLIVNTMSELHLVSFEQEIFNVVLKTVSESATQPPTKVYNNDLTASLMVALDSNNTMPFTPAAMRSETLGFYPWKPTIPTPWRYYFQWDRTLIPSHTGTSGTPTNIYHGTDPDDVQFYTIENSVPVHLLRTGDEFATGTFFFDCKPCRLTHTWQTNRALGLPPFLNSLPQSEGATNFGDIGVQQDKRRGVTQMGNTNYITEATIMRPAEVGYSAPYYSFEASTQGPFKTPIAAGRGGAQTDENQAADGNPRYAFGRQHGQKTTTTGETPERFTYIAHQDTGRYPEGDWIQNINFNLPVTNDNVLLPTDPIGGKTGINYTNIFNTYGPLTALNNVPPVYPNGQIWDKEFDTDLKPRLHVNAPFVCQNNCPGQLFVKVAPNLTNEYDPDASANMSRIVTYSDFWWKGKLVFKAKLRASHTWNPIQQMSINVDNQFNYVPSNIGGMKIVYEKSQLAPRKLY

SEQ ID NO: 884 - protein, 736 aa, Artificial Sequence; identical to SEQ ID NO: 112
  source: /note="Description of Artificial Sequence: Synthetic polypeptide"

SEQ ID NO: 885 - protein, 736 aa, Artificial Sequence; identical to SEQ ID NO: 107
  source: /note="Description of Artificial Sequence: Synthetic polypeptide"

SEQ ID NO: 886 - protein, 736 aa, Artificial Sequence
  source: /note="Description of Artificial Sequence: Synthetic polypeptide"
MAADGYLPDWLEDTLSEGIRQWWKLKPGPPPPKPAERHKDDSRGLVLPGYKYLGPFNGLDKGEPVNEADAAALEHDKAYDRQLDSGDNPYLKYNHADAEFQERLKEDTSFGGNLGRAVFQAKKRVLEPLGLVEEPVKTAPGKKRPVEHSPVEEPDSSSGTGKAGQQPARKRLNFGQTGDADSVPDPQPLGQPPAAPSGLGTNTMATGSGAPMADNNEGADGVGNSSGNWHCDSTWMGDRVITTSTRTWALPTYNNHLYKQISSQSGASNDNHYFGYSTPWGYFDFNRFHCHFSPRDWQRLINNNWGFRPKRLNFKLFNIQVKEVTQNDGTTTIANNLTSTVQVFTDSEYQLPYVLGSAHQGCLPPFPADVFMVPQYGYLTLNNGSQAVGRSSFYCLEYFPSQMLRTGNNFTFSYTFEDVPFHSSYAHSQSLDRLMNPLIDQYLYYLSRTNTPSGTTTQSRLQFSQAGASDIRDQSRNWLPGPCYRQQRVSKTSADNNNSEYSWTGATKYHLNGRDSLVNPGPAMASHKDDEEKFFPQSGVLIFGKQGSEKTNVDIEKVMITDEEEIRTTNPVATEQYGSVSTNLQRGNRQAATADVNTQGVLPGMVWQDRDVYLQGPIWAKIPHTDGHFHPSPLMGGFGLKHPPPQILIKNTPVPANPSTTFSAAKFASFITQYSTGQVSVEIEWELQKENSKRWNPEIQYTSNYNKSVNVDFTVDTNGVYSEPRPIGTRYLTRNL

SEQ ID NO: 887 - protein, 736 aa, Artificial Sequence
  source: /note="Description of Artificial Sequence: Synthetic polypeptide"
MAADGYLPDWLEDNLSEGIREWWDLKPGAPKPKANQQKQDDGRGLVLPGYKYLGPFNGLDKGEPVNAADAAALEHDKAYDQQLKAGDNPYLRYNHADAEFQERLQEDTSFGGNLGRAVFQAKKRVLEPFGLVEEGAKTAPGKKRPVEQSPQEPDSSSGIGKTGQQPAKKRLNFGQTGDSESVPDPQPLGEPPATPAAVGPTTMASGGGAPMADNNEGADGVGNASGNWHCDSTWLGDRVITTSTRTWALPTYNNHLYKQISSASTGASNDNHYFGYSTPWGYFDFNRFHCHFSPRDWQRLINNNWGFRPKRLNFKLFNVQVKEVTTNDGVTTIANNLTSTVQVFSDSEYQLPYVLGSAHQGCLPPFPADVFMIPQYGYLTLNNGSQAVGRSSFYCLEYFPSQMLRTGNNFTFSYTFEDVPFHSSYAHSQSLDRLMNPLIDQYLYYLNRTQDQSGSAQNKDLLFSRGSPAGMSVQPKNWLPGPCYRQQRVSKTKTDNNNSNFTWTGASKYNLNGRESIINPGTAMASHKDDKNKFFPMSGVMIFGKESAGASNTALDNVMITDEEEIKATNPVATERFGTVAVNLQSSSTDPATGDVHVMGALPGMVWQDRDVYLQGPIWAKIPHTDGHFHPSPLMGGFGLKNPPPQILIKNTPVPANPPAEFSATKFASFITQYSTGQVSVEIEWELQKENSKRWNPEVQYTSNYAKSANVDFTVDNNGLYTEPRPIGTRYLTRPL

SEQ ID NO: 888 - protein, 737 aa, Artificial Sequence
  source: /note="Description of Artificial Sequence: Synthetic polypeptide"
MAADGYLPDWLEDTLSEGIRQWWKLKPGPPPPKPAERHKDDSRGLVLPGYKYLGPGNGLDKGEPVNAADAAALEHDKAYDQQLKAGDNPYLKYNHADAEFQERLKEDTSFGGNLGRAVFQAKKRVLEPLGLVEEGAKTAPGKKRPVEPSPQRSPDSSTGIGKKGQQPARKRLNFGQTGDSESVPDPQPLGEPPATPAAVGPTTMASGGGAPMADNNEGADGVGNASGNWHCDSTWLGDRVITTSTRTWALPTYNNHLYKQISSASTGASNDNHYFGYSTPWGYFDFNRFHCHFSPRDWQRLINNNWGFRPKRLNFKLFNIQVKEVTTNDGVTTIANNLTSTVQVFSDSEYQLPYVLGSAHQGCLPPFPADVFMIPQYGYLTLNNGSQAVGRSSFYCLEYFPSQMLRTGNNFTFSYTFEDVPFHSSYAHSQSLDRLMNPLIDQYLYYLNRTQNQSGSAQNKDLLFSRGSPAGMSVQPKNWLPGPCYRQQRVSKTKTDNNNSNFTWTGASKYNLNGRESIINPGTAMASHKDDKDKFFPMSGVMIFGKESAGASNTALDNVMITDEEEIKATNPVATERFGTVAVNLQSSSTDPATEDVHVMGALPGMVWQDRDVYLQGPIWAKIPHTDGHFHPSPLMGGFGLKNPPPQILIKNTPVPANPPAEFSATKFASFITQYSTGQVSVEIEWELQKENSKRWNPEVQYTSNYAKSANVDFTVDNNGLYTEPRPIGTRYLTRNL

SEQ ID NO: 889 - protein, 736 aa, Artificial Sequence
  source: /note="Description of Artificial Sequence: Synthetic polypeptide"
MAADGYLPDWLEDNLSEGIREWWDLKPGAPKPKANQQKQDDGRGLVLPGYKYLGPFNGLDKGEPVNAADAAALEHDKAYDQQLKAGDNPYLRYNHADAEFQERLQEDTSFGGNLGRAVFQAKKRVLEPFGLVEEGAKTAPGKKRPVEQSPQEPDSSSGIGKTGQQPAKKRLNFGQTGDSESVPDPQPLGEPPATPAAVGPTTMASGGGAPMADNNEGADGVGNASGNWHCDSTWLGDRVITTSTRTWALPTYNNHLYKQISSASTGASNDNHYFGYSTPWGYFDFNRFHCHFSPRDWQRLINNNWGFRPKRLNFKLFNVQVKEVTTNDGVTTIANNLTSTVQVFSDSEYQLPYVLGSAHQGCLPPFPADVFMIPQYGYLTLNNGSQAVGRSSFYCLEYFPSQMLRTGNNFTFSYTFEDVPFHSSYAHSQSLDRLMNPLIDQYLYYLNRTQDQSGSAQNKDLLFSRGSPAGMSVQPKNWLPGPCYRQQRVSKTKTDNNNSNFTWTGASKYNLNGRESIINPGTAMASHKDDKNKFFPMSGVMIFGKESAGASNTALDNVMITDEEEIKATNPVATERFGTVAVNLQSSSTDPATGDVHVMGALPGMVWQDRDVYLQGPIWAKIPHTDGHFHPSPLMGGFGLKHPPPQILIKNTPVPANPPAEFSATKFASFITQYSTGQVSVEIEWELQKENSKRWNPEVQYTSNYAKSANVDFTVDNNGLYTEPRPIGTRYLTRPL

SEQ ID NO: 890 - protein, 736 aa, Artificial Sequence
  source: /note="Description of Artificial Sequence: Synthetic polypeptide"
MAADGYLPDWLEDNLSEGIREWWDLKPGAPKPKANQQKQDDGRGLVLPGYKYLGPFNGLDKGEPVNAADAAALEHDKAYDQQLKAGDNPYLRYNHADAEFQERLQEDTSFGGNLGRAVFQAKKRVLEPFGLVEEGAKTAPGKKRPVEQSPQEPDSSSGIGKTGQQPAKKRLNFGQTGDSESVPDPQPLGEPPATPAAVGPTTMASGGGAPMADNNEGADGVGNASGNWHCDSTWLGDRVITTSTRTWALPTYNNHLYKQISSASTGASNDNHYFGYSTPWGYFDFNRFHCHFSPRDWQRLINNNWGFRPKRLNFKLFNVQVKEVTTNDGVTTIANNLTSTVQVFSDSEYQLPYVLGSAHQGCLPPFPADVFMIPQYGYLTLNNGSQAVGRSSFYCLEYFPSQMLRTGNNFTFSYTFEDVPFHSSYAHSQSLDRLMNPLIDQYLYYLNRTQDQSGSAQNKDLLFSRGSPAGMSVQPKNWLPGPCYRQQRVSKTKTDNNNSNFTWTGASKYNLNGRESIINPGTAMASHKDDKDKFFPMSGVMIFGKESAGASNTALDNVMITDEEEIKATNPVATERFGTVAVNLQSSSTDPATGDVHVMGALPGMVWQDRDVYLQGPIWAKIPHTDGHFHPSPLMGGFGLKHPPPQILIKNTPVPANPPAEFSATKFASFITQYSTGQVSVEIEWELQKENSKRWNPEVQYTSNYAKSANVDFTVDNNGLYTEPRPIGTRYLTRPL

SEQ ID NO: 891 - protein, 736 aa, Artificial Sequence
  source: /note="Description of Artificial Sequence: Synthetic polypeptide"
MAADGYLPDWLEDNLSEGIREWWDLKPGAPKPKANQQKQDDGRGLVLPGYKYLGPFNGLDKGEPVNAADAAALEHDKAYDQQLKAGDNPYLRYNHADAEFQERLQEDTSFGGNLGRAVFQAKKRVLEPFGLVEEGAKTAPGKKRPVEQSPQEPDSSSGIGKTGQQPAKKRLNFGQTGDSESVPDPQPLGEPPATPAAVGPTTMASGGGAPMADNNEGADGVGNASGNWHCDSTWLGDRVITTSTRTWALPTYNNHLYKQISSASTGASNDNHYFGYSTPWGYFDFNRFHCHFSPRDWQRLINNNWGFRPKRLNFKLFNIQVKEVTTNDGVTTIANNLTSTVQVFSDSEYQLPYVLGSAHQGCLPPFPADVFMIPQYGYLTLNNGSQAVGRSSFYCLEYFPSQMLRTGNNFTFSYTFEDVPFHSSYAHSQSLDRLMNPLIDQYLYYLNRTQDQSGSAQNKDLLFSRGSPAGMSVQPKNWLPGPCYRQQRVSKTKTDNNNSNFTWTGASKYNLNGRESIINPGTAMASHKDDKNKFFPMSGVMIFGKESAGASNTALDNVMITDEEEIKATNPVATERFGTVAVNLQSSSTDPATGDVHVMGALPGMVWQDRDVYLQGPIWAKIPHTDGHFHPSPLMGGFGLKHPPPQILIKNTPVPANPPAEFSATKFASFITQYSTGQVSVEIEWELQKENSKRWNPEVQYTSNYAKSANVDFTVDNNGLYTEPRPIGTRYLTRPL

SEQ ID NO: 892 - protein, 736 aa, Artificial Sequence
  source: /note="Description of Artificial Sequence: Synthetic polypeptide"
MAADGYLPDWLEDNLSEGIREWWDLKPGAPKPKANQQKQDDGRGLVLPGYKYLGPFNGLDKGEPVNAADAAALEHDKAYDQQLKAGDNPYLRYNHADAEFQERLQEDTSFGGNLGRAVFQAKKRVLEPFGLVEEGAKTAPGKKRPVEQSPQEPDSSSGIGKTGQQPAKKRLNFGQTGDSESVPDPQPLGEPPATPAAVGPTTMASGGGAPMADNNEGADGVGNASGNWHCDSTWLGDRVITTSTRTWALPTYNNHLYKQISSASTGASNDNHYFGYSTPWGYFDFNRFHCHFSPRDWQRLINNNWGFRPKRLNFKLFNVQVKEVTTNDGVTTIANNLTSTVQVFSDSEYQLPYVLGSAHQGCLPPFPADVFMIPQYGYLTLNNGSQAVGRSSFYCLEYFPSQMLRTGNNFTFSYTFEDVPFHSSYAHSQSLDRLMNPLIDQYLYYLNRTQNQSGSAQNKDLLFSRGSPAGMSVQPKNWLPGPCYRQQRVSKTKTDNNNSNFTWTGASKYNLNGRESIINPGTAMASHKDDKDKFFPMSGVMIFGKESAGASNTALDNVMITDEEEIKATNPVATERFGTVAVNLQSSSTDPATGDVHVMGALPGMVWQDRDVYLQGPIWAKIPHTDGHFHPSPLMGGFGLKHPPPQILIKNTPVPANPPAEFSATKFASFITQYSTGQVSVEIEWELQKENSKRWNPEVQYTSNYAKSANVDFTVDNNGLYTEPRPIGTRYLTRPL

SEQ ID NO: 893 - protein, 736 aa, Artificial Sequence
  source: /note="Description of Artificial Sequence: Synthetic polypeptide"
MAADGYLPDWLEDNLSEGIREWWDLKPGAPKPKANQQKQDDGRGLVLPGYKYLGPFNGLDKGEPVNAADAAALEHDKAYDQQLKAGDNPYLRYNHADAEFQERLQEDTSFGGNLGRAVFQAKKRVLEPFGLVEEGAKTAPGKKRPVEQSPQEPDSSSGIGKTGQQPAKKRLNFGQTGDSESVPDPQPLGEPPATPAAVGPTTMASGGGAPMADNNEGADGVGNASGNWHCDSTWLGDRVITTSTRTWALPTYNNHLYKQISSASTGASNDNHYFGYSTPWGYFDFNRFHCHFSPRDWQRLINNNWGFRPKRLNFKLFNVQVKEVTTNDGVTTIANNLTSTVQVFSDSEYQLPYVLGSAHQGCLPPFPADVFMIPQYGYLTLNNGSQAVGRSSFYCLEYFPSQMLRTGNNFTFSYTFEDVPFHSSYAHSQSLDRLMNPLIDQYLYYLNRTQNQSGSAQNKDLLFSRGSPAGMSVQPKNWLPGPCYRQQRVSKTKTDNNNSNFTWTGASKYNLNGRESIINPGTAMASHKDDKNKFFPMSGVMIFGKESAGASNTALDNVMITDEEEIKATNPVATERFGTVAVNLQSSSTDPATGDVHVMGALPGMVWQDRDVYLQGPIWAKIPHTDGHFHPSPLMGGFGLKHPPPQILIKNTPVPANPPAEFSATKFASFITQYSTGQVSVEIEWELQKENSKRWNPEVQYTSNYAKSANVDFTVDNNGLYTEPRPIGTRYLTRPL

SEQ ID NO: 894 - DNA, 2217 bp, Artificial Sequence
  source: /note="Description of Artificial Sequence: Synthetic polynucleotide"
atggctgccgatggttatcttccagattggctcgaggacaacctctctgagggcattcgcgagtggtgggacctgaaacctggagccccgaaacccaaagccaaccagcaaaagcaggacaacggccggggtctggtgcttcctggctacaagtacctcggacccttcaacggactcgacaagggggagcccgtcaacgcggcggacgcagcggccctcgagcacgacaaggcctacgaccagcagctccaagcgggtgacaatccgtacctgcggtataatcacgccgacgccgagtttcaggagcgtctgcaagaagatacgtcttttgggggcaacctcgggcgcgcagtcttccaggccaaaaagcgggttctcgaacctctgggcctggttgaatcgccggttaagacggctcctggaaagaagagaccggtagagccatcaccccagcgctctccagactcctctacgggcatcggcaagaaaggccagcagcccgcaaaaaagagactcaattttgggcagactggcgactcagagtcagtccccgaccctcaaccaatcggagaaccaccagcaggcccctctggtctgggatctggtacaatggctgcaggcggtggcgctccaatggcagacaataacgaaggcgccgacggagtgggtagttcctcaggaaattggcattgcgattccacatggctgggcgacagagtcatcaccaccagcacccgcacctgggccctgcccacctacaacaaccacctctacaagcaaatctccaacgggacctcgggaggaagcaccaacgacaacacctacttcggctacagcaccccctgggggtattttgacttcaacagattccactgccacttttcaccacgtgactggcagcgactcatcaacaacaactggggattccggcccaagaggctcaacttcaagctcttcaacatccaagtcaaggaggtcacgcagaatgaaggcaccaagaccatcgccaataaccttaccagcacgattcaggtctttacggactcggaataccagctcccgtacgtgctcggctcggcgcaccagggctgcctgcctccgttcccggcggacgtcttcatgattcctcagtacgggtacctgactctgaacaatggcagtcaggctgtgggccggtcgtccttctactgcctggagtactttccttctcaaatgctgagaacgggcaacaactttgaattcagctacaacttcgaggacgtgcccttccacagcagctacgcgcacagccagagcctggaccggctgatgaaccctctcatcgaccagtacttgtactacctgtcccggactcaaagcacgggcggtactgcaggaactcagcagttgctattttctcaggccgggcctaacaacatgtcggctcaggccaagaactggctacccggtccctgctaccggcagcaacgcgtctccacgacactgtcgcagaacaacaacagcaactttgcctggacgggtgccaccaagtatcatctgaatggcagagactctctggtgaatcctggcgttgccatggctacccacaaggacgacgaagagcgattttttccatccagcggagtcttaatgtttgggaaacagggagctggaaaagacaacgtggactatagcagcgtgatgctaaccagcgaggaagaaataaagaccaccaacccagtggccacagaacagtacggcgtggtggccgataacctgcaacagcaaaacgccgctcctattgtaggggccgtcaatagtcaaggagccttacctggcatggtgtggcagaaccgggacgtgtacctgcagggtcccatctgggccaagattcctcatacggacggcaactttcatccctcgccgctgatgggaggctttggactgaagcatccgcctcctcagatcctgattaaaaacacacctgttcccgcggatcctccgaccaccttcaatcaggccaagctggcttctttcatcacgcagtacagtaccggccaggtcagcgtggagatcgagtgggagctgcagaaggagaacagcaaacgctggaacccagagattcagtacacttccaactactacaaatctacaaatgtggactttgctgtcaatactgagggtacttattccgagcctcgccccattggcacccgttacctcacccgtaatctgtaa

SEQ ID NO: 895 - protein, 738 aa, Artificial Sequence
  source: /note="Description of Artificial Sequence: Synthetic polypeptide"
MAADGYLPDWLEDNLSEGIREWWDLKPGAPKPKANQQKQDNGRGLVLPGYKYLGPFNGLDKGEPVNAADAAALEHDKAYDQQLQAGDNPYLRYNHADAEFQERLQEDTSFGGNLGRAVFQAKKRVLEPLGLVESPVKTAPGKKRPVEPSPQRSPDSSTGIGKKGQQPAKKRLNFGQTGDSESVPDPQPIGEPPAGPSGLGSGTMAAGGGAPMADNNEGADGVGSSSGNWHCDSTWLGDRVITTSTRTWALPTYNNHLYKQISNGTSGGSTNDNTYFGYSTPWGYFDFNRFHCHFSPRDWQRLINNNWGFRPKRLNFKLFNIQVKEVTQNEGTKTIANNLTSTIQVFTDSEYQLPYVLGSAHQGCLPPFPADVFMIPQYGYLTLNNGSQAVGRSSFYCLEYFPSQMLRTGNNFEFSYNFEDVPFHSSYAHSQSLDRLMNPLIDQYLYYLSRTQSTGGTAGTQQLLFSQAGPNNMSAQAKNWLPGPCYRQQRVSTTLSQNNNSNFAWTGATKYHLNGRDSLVNPGVAMATHKDDEERFFPSSGVLMFGKQGAGKDNVDYSSVMLTSEEEIKTTNPVATEQYGVVADNLQQQNAAPIVGAVNSQGALPGMVWQNRDVYLQGPIWAKIPHTDGNFHPSPLMGGFGLKHPPPQILIKNTPVPADPPTTFNQAKLASFITQYSTGQVSVEIEWELQKENSKRWNPEIQYTSNYYKSTNVDFAVNTEGTYSEPRPIGTRYLTRNL

SEQ ID NO: 896 - protein, 738 aa, Artificial Sequence; identical to SEQ ID NO: 895
  source: /note="Description of Artificial Sequence: Synthetic polypeptide"

SEQ ID NO: 897 - DNA, 4472 bp, Artificial Sequence
  source: /note="Description of Artificial Sequence: Synthetic polynucleotide"
ctccatcactaggggtaaccgcgaagcgcctcccacgctgccgcgtcagcgctgacgtaaattacgtcataggggagtggtcctgtattagctgtcacgtgagtgcttttgcgacattttgcgacaccacgtggccattcatggtatatatggccgagtgagcgagcaggatctccattttgaccgcgaaatttgaacgagcagcagccatgccgggcttctacgagatcgtgcttaaggtgccgagcgacctggacgagcacctgccgggcatttctgactcgtttgtgaactgggtggcagagaaggaatgggagctgcccccggattctgacatggatcggaatctgattgagcaggcacccctgaccgtggccgagaagctacagcgcgacttcctggtccaatggcgccgcgtgagtaaggccccggaggccctcttctttgttcagttcgagaagggcgagtcctacttccacctccatattctggtagagaccacgggggtcaaatccatggtgctgggccgcttcctgagtcagattcgggacaagctggtgcagaccatctaccgcgggatcgagccgaccctgcccaactggttcgcggtgacaaagacgcgtaatggcgccggaggggggaacaaggtggtggacgagtgctacatccccaactacctgctgcccaagactcagcccgagctgcagtgggcgtggactaacatggaggagtatataagcgcgtgcttgaacctggccgagcgcaaacggctcgtggcgcagcacctgacccacgtcagccagacccaggagcagaacaaggagaatctgaacccgaattctgacgcgcctgtcatccggtcaaaaacctccgcgcgctacatggagctggtcgggtggctggtggaccggggcatcacctccgagaagcagtggatccaggaggaccaggcctcgtacatctccttcaacgccgcctccaactcgcggtctcagatcaaggccgcgctggacaatgccggcaagatcatggcgctgaccaaatccgcgcccgactacctggtaggccccgctctgcccgcggacattaaatccaaccgcatctaccgcatcctggagctgaatggctacgaccctgcctacgccggttccgtctttctcggctgggcccagaaaaagtttggcaaaaggaacaccatctggctgtttgggccggccaccacgggcaagaccaacatcgcggaagccatcgcccacgccgtgcccttctacggctgcgtcaactggaccaatgagaactttcccttcaacgattgcgtcgacaagatggtgatctggtgggaggagggcaagatgacggccaaggtcgtggagtccgccaaggccattctcggcggcagcaaggtgcgcgtggaccaaaagtgcaagtcgtccgcccagatcgatcccacccccgtgatcgtcacctccaacaccaacatgtgcgccgtgattgacgggaacagcaccaccttcgagcaccagcagccgttgcaggaccggatgttcaaatttgaacttacccgccgtctggagcacgactttggcaaggtgacaaagcaggaagtcaaagagttcttccgctgggcgcaggatcacgtgaccgaggtggcgcatgagttctacgtcagaaagggtggagctaacaaaagacccgcccccgatgacgcggatataagcgagcccaagcgggcctgcccctcagtcgcggatccatcgacgtcagacgcggaaggagctccggtggactttgccgacaggtaccaaaacaaatgttctcgtcacgcgggcatgcttcagatgctgtttccctgcaaaacatgcgagagaatgaatcagaatttcaacatttgcttcacgcacgggaccagagactgttcagaatgtttccctggcgtgtcagaatctcaaccggtcgtcagaaaaaagacgtatcggaaactctgtgcgattcatcatctgctggggcgggcacccgagattgcttgctcggcctgcgacctggtcaacgtggacctggatgactgtgtttctgagcaataaatgacttaaaccaggtatggctgccgatggttatcttccagattggctcgaggacaacctctctgagggcattcgcgagtggtgggacctgaaacctggagccccgaaacccaaagccaaccagcaaaagcaggacaacggccggggtctggtgcttcctggctacaagtacctcggacccttcaacggactcgacaagggggagcccgtcaacgcggcggacgcagcggccctcgagcacgacaaggcctacgaccagcagctccaagcgggtgacaatccgtacctgcggtataatcacgccgacgccgagtttcaggagcgtctgcaagaagatacgtcttttgggggcaacctcgggcgcgcagtcttccaggccaaaaagcgggttctcgaacctctgggcctggttgaatcgccggttaagacggctcctggaaagaagagaccggtagagccatcaccccagcgctctccagactcctctacgggcatcggcaagaaaggccagcagcccgcaaaaaagagactcaattttgggcagactggcgactcagagtcagtccccgaccctcaaccaatcggagaaccaccagcaggcccctctggtctgggatctggtacaatggctgcaggcggtggcgctccaatggcagacaataacgaaggcgccgacggagtgggtagttcctcaggaaattggcattgcgattccacatggctgggcgacagagtcatcaccaccagcacccgcacctgggccctgcccacctacaacaaccacctctacaagcaaatctccaacgggacctcgggaggaagcaccaacgacaacacctacttcggctacagcaccccctgggggtattttgacttcaacagattccactgccacttttcaccacgtgactggcagcgactcatcaacaacaactggggattccggcccaagaggctcaacttcaagctcttcaacatccaagtcaaggaggtcacgcagaatgaaggcaccaagaccatcgccaataaccttaccagcacgattcaggtctttacggactcggaataccagctcccgtacgtgctcggctcggcgcaccagggctgcctgcctccgttcccggcggacgtcttcatgattcctcagtacgggtacctgactctgaacaatggcagtcaggctgtgggccggtcgtccttctactgcctggagtactttccttctcaaatgctgagaacgggcaacaactttgaattcagctacaacttcgaggacgtgcccttccacagcagctacgcgcacagccagagcctggaccggctgatgaaccctctcatcgaccagtacttgtactacctgtcccggactcaaagcacgggcggtactgcaggaactcagcagttgctattttctcaggccgggcctaacaacatgtcggctcaggccaagaactggctacccggtccctgctaccggcagcaacgcgtctccacgacactgtcgcagaacaacaacagcaactttgcctggacgggtgccaccaagtatcatctgaatggcagagactctctggtgaatcctggcgttgccatggctacccacaaggacgacgaagagcgattttttccatccagcggagtcttaatgtttgggaaacagggagctggaaaagacaacgtggactatagcagcgtgatgctaaccagcgaggaagaaataaagaccaccaacccagtggccacagaacagtacggcgtggtggccgataacctgcaacagcaaaacgccgctcctattgtaggggccgtcaatagtcaaggagccttacctggcatggtgtggcagaaccgggacgtgtacctgcagggtcccatctgggccaagattcctcatacggacggcaactttcatccctcgccgctgatgggaggctttggactgaagcatccgcctcctcagatcctgattaaaaacacacctgttcccgcggatcctccgaccaccttcaatcaggccaagctggcttctttcatcacgcagtacagtaccggccaggtcagcgtggagatcgagtgggagctgcagaaggagaacagcaaacgctggaacccagagattcagtacacttccaactactacaaatctacaaatgtggactttgctgtcaatactgagggtacttattccgagcctcgccccattggcacccgttacctcacccgtaatctgtaattacatgttaatcaataaaccggttaattcgtttcagttgaactttggtctcctgtccttcttatcttatcggttaccatagaaactggttacttattaactgcttggtgcgcttcgcgataaaagacttacgtcatcgggttacccctagtgatgga

SEQ ID NO: 898 - protein, 738 aa, Artificial Sequence
  source: /note="Description of Artificial Sequence: Synthetic polypeptide"
MAADGYLPDWLEDNLSEGIREWWDLKPGAPKPKANQQKQDNGRGLVLPGYKYLGPFNGLDKGEPVNAADAAALEHDKAYDQQLQAGDNPYLRYNHADAEFQERLQEDTSFGGNLGRAVFQAKKRVLEPLGLVESPVKTAPGKKRPVEPSPQRSPDSSTGIGKKGQQPAKKRLNFGQTGDSESVPDPQPIGEPPAAPSGVGPNTMAAGGGAPMADNNEGADGVGSSSGNWHCDSTWLGDRVITTSTRTWALPTYNNHLYKQISNGTSGGSTNDNTYFGYSTPWGYFDFNRFHCHFSPRDWQRLINNNWGFRPKRLNFKLFNIQVKEVTQNEGTKTIANNLTSTIQVFTDSEYQLPYVLGSAHQGCLPPFPADVFMIPQYGYLTLNNGSQAVGRSSFYCLEYFPSQMLRTGNNFEFSYNFEDVPFHSSYAHSQSLDRLMNPLIDQYLYYLSRTQSTGGTAGTQQLLFSQAGPNNMSAQAKNWLPGPCYRQQRVSTTLSQNNNSNFAWTGATKYHLNGRDSLVNPGVAMATHKDDEERFFPSSGVLMFGKQGAGKDNVDYSSVMLTSEEEIKTTNPVATEQYGVVADNLQQQNAAPIVGAVNSQGALPGMVWQNRDVYLQGPIWAKIPHTDGNFHPSPLMGGFGLKHPPPQILIKNTPVPADPPTTFNQAKLASFITQYSTGQVSVEIEWELQKENSKRWNPEIQYTSNYYKSTNVDFAVNTEGTYSEPRPIGTRYLTRNL

SEQ ID NO: 899 - protein, 738 aa, Artificial Sequence
  source: /note="Description of Artificial Sequence: Synthetic polypeptide"
MAADGYLPDWLEDNLSEGIREWWDLKPGAPKPKANQQRQDNGRGLVLPGYRYLGPFNGLDKGEPVNAADAAALEHDRAYDQQLQAGDNPYLRYNHADAEFQERLQEDTSFGGNLGRAVFQAKKRVLEPLGLVESPVRTAPGKKRPVEPSPQRSPDSSTGIGKKGQQPARKRLNFGQTGDSESVPDPQPIGEPPAAPSGVGPNTMAAGGGAPMADNNEGADGVGSSSGNWHCDSTWLGDRVITTSTRTWALPTYNNHLYRQISNGTSGGSTNDNTYFGYSTPWGYFDFNRFHCHFSPRDWQRLINNNWGFRPKRLNFKLFNIQVKEVTQNEGTRTIANNLTSTIQVFTDSEYQLPYVLGSAHQGCLPPFPADVFMIPQYGYLTLNNGSQAVGRSSFYCLEYFPSQMLRTGNNFEFSYNFEDVPFHSSYAHSQSLDRLMNPLIDQYLYYLSRTQSTGGTAGTQQLLFSQAGPNNMSAQAKNWLPGPCYRQQRVSTTLSQNNNSNFAWTGATKYHLNGRDSLVNPGVAMATHRDDEERFFPSSGVLMFGRQGAGRDNVDYSSVMLTSEEEIRTTNPVATEQYGVVADNLQQQNAAPIVGAVNSQGALPGMVWQNRDVYLQGPIWAKIPHTDGNFHPSPLMGGFGLKHPPPQILIKNTPVPADPPTTFNQAKLASFITQYSTGQVSVEIEWELQKENSKRWNPEIQYTSNYYKSTNVDFAVNTEGTYSEPRPIGTRYLTRNL

SEQ ID NO: 900 - protein, 738 aa, Artificial Sequence
  source: /note="Description of Artificial Sequence: Synthetic polypeptide"
MAADGYLPDWLEDNLSEGIREWWDLKPGAPKPKANQQRQDNGRGLVLPGYRYLGPFNGLDKGEPVNAADAAALEHDRAYDQQLQAGDNPYLRYNHADAEFQERLQEDTSFGGNLGRAVFQAKKRVLEPLGLVESPVRTAPGKKRPVEPSPQRSPDSSTGIGKRGQQPARKRLNFGQTGDSESVPDPQPIGEPPAAPSGVGPNTMAAGGGAPMADNNEGADGVGSSSGNWHCDSTWLGDRVITTSTRTWALPTYNNHLYRQISNGTSGGSTNDNTYFGYSTPWGYFDFNRFHCHFSPRDWQRLINNNWGFRPKRLNFKLFNIQVKEVTQNEGTRTIANNLTSTIQVFTDSEYQLPYVLGSAHQGCLPPFPADVFMIPQYGYLTLNNGSQAVGRSSFYCLEYFPSQMLRTGNNFEFSYNFEDVPFHSSYAHSQSLDRLMNPLIDQYLYYLSRTQSTGGTAGTQQLLFSQAGPNNMSAQAKNWLPGPCYRQQRVSTTLSQNNNSNFAWTGATKYHLNGRDSLVNPGVAMATHRDDEERFFPSSGVLMFGKQGAGRDNVDYSSVMLTSEEEIRTTNPVATEQYGVVADNLQQQNAAPIVGAVNSQGALPGMVWQNRDVYLQGPIWAKIPHTDGNFHPSPLMGGFGLKHPPPQILIKNTPVPADPPTTFNQAKLASFITQYSTGQVSVEIEWELQKENSKRWNPEIQYTSNYYKSTNVDFAVNTEGTYSEPRPIGTRYLTRNL

SEQ ID NO: 901 - protein, 738 aa, Artificial Sequence
  source: /note="Description of Artificial Sequence: Synthetic polypeptide"
MAADGYLPDWLEDNLSEGIREWWDLKPGAPKPKANQQRQDNGRGLVLPGYRYLGPFNGLDKGEPVNAADAAALEHDRAYDQQLQAGDNPYLRYNHADAEFQERLQEDTSFGGNLGRAVFQAKKRVLEPLGLVESPVRTAPGKKRPVEPSPQRSPDSSTGIGKRGQQPAKKRLNFGQTGDSESVPDPQPIGEPPAAPSGVGPNTMAAGGGAPMADNNEGADGVGSSSGNWHCDSTWLGDRVITTSTRTWALPTYNNHLYRQISNGTSGGSTNDNTYFGYSTPWGYFDFNRFHCHFSPRDWQRLINNNWGFRPKRLNFKLFNIQVKEVTQNEGTRTIANNLTSTIQVFTDSEYQLPYVLGSAHQGCLPPFPADVFMIPQYGYLTLNNGSQAVGRSSFYCLEYFPSQMLRTGNNFEFSYNFEDVPFHSSYAHSQSLDRLMNPLIDQYLYYLSRTQSTGGTAGTQQLLFSQAGPNNMSAQAKNWLPGPCYRQQRVSTTLSQNNNSNFAWTGATKYHLNGRDSLVNPGVAMATHRDDEERFFPSSGVLMFGRQGAGRDNVDYSSVMLTSEEEIRTTNPVATEQYGVVADNLQQQNAAPIVGAVNSQGALPGMVWQNRDVYLQGPIWAKIPHTDGNFHPSPLMGGFGLKHPPPQILIKNTPVPADPPTTFNQAKLASFITQYSTGQVSVEIEWELQKENSKRWNPEIQYTSNYYKSTNVDFAVNTEGTYSEPRPIGTRYLTRNL

SEQ ID NO: 902 - protein, 738 aa, Artificial Sequence
  source: /note="Description of Artificial Sequence: Synthetic polypeptide"
MAADGYLPDWLEDNLSEGIREWWDLKPGAPKPKANQQRQDNGRGLVLPGYRYLGPFNGLDKGEPVNAADAAALEHDRAYDQQLQAGDNPYLRYNHADAEFQERLQEDTSFGGNLGRAVFQAKKRVLEPLGLVESPVRTAPGKKRPVEPSPQRSPDSSTGIGKRGQQPAKKRLNFGQTGDSESVPDPQPIGEPPAAPSGVGPNTMAAGGGAPMADNNEGADGVGSSSGNWHCDSTWLGDRVITTSTRTWALPTYNNHLYRQISNGTSGGSTNDNTYFGYSTPWGYFDFNRFHCHFSPRDWQRLINNNWGFRPKRLNFKLFNIQVKEVTQNEGTRTIANNLTSTIQVFTDSEYQLPYVLGSAHQGCLPPFPADVFMIPQYGYLTLNNGSQAVGRSSFYCLEYFPSQMLRTGNNFEFSYNFEDVPFHSSYAHSQSLDRLMNPLIDQYLYYLSRTQSTGGTAGTQQLLFSQAGPNNMSAQAKNWLPGPCYRQQRVSTTLSQNNNSNFAWTGATKYHLNGRDSLVNPGVAMATHRDDEERFFPSSGVLMFGKQGAGRDNVDYSSVMLTSEEEIRTTNPVATEQYGVVADNLQQQNAAPIVGAVNSQGALPGMVWQNRDVYLQGPIWAKIPHTDGNFHPSPLMGGFGLKHPPPQILIKNTPVPADPPTTFNQARLASFITQYSTGQVSVEIEWELQKENSKRWNPEIQYTSNYYKSTNVDFAVNTEGTYSEPRPIGTRYLTRNL

SEQ ID NO: 903 - protein, 738 aa, Artificial Sequence
  source: /note="Description of Artificial Sequence: Synthetic polypeptide"
MAADGYLPDWLEDNLSEGIREWWDLKPGAPKPKANQQRQDNGRGLVLPGYRYLGPFNGLDKGEPVNAADAAALEHDRAYDQQLQAGDNPYLRYNHADAEFQERLQEDTSFGGNLGRAVFQAKKRVLEPLGLVESPVRTAPGKKRPVEPSPQRSPDSSTGIGKKGQQPAKKRLNFGQTGDSESVPDPQPIGEPPAAPSGVGPNTMAAGGGAPMADNNEGADGVGSSSGNWHCDSTWLGDRVITTSTRTWALPTYNNHLYRQISNGTSGGSTNDNTYFGYSTPWGYFDFNRFHCHFSPRDWQRLINNNWGFRPKRLNFKLFNIQVKEVTQNEGTRTIANNLTSTIQVFTDSEYQLPYVLGSAHQGCLPPFPADVFMIPQYGYLTLNNGSQAVGRSSFYCLEYFPSQMLRTGNNFEFSYNFEDVPFHSSYAHSQSLDRLMNPLIDQYLYYLSRTQSTGGTAGTQQLLFSQAGPNNMSAQAKNWLPGPCYRQQRVSTTLSQNNNSNFAWTGATKYHLNGRDSLVNPGVAMATHRDDEERFFPSSGVLMFGRQGAGRDNVDYSSVMLTSEEEIRTTNPVATEQYGVVADNLQQQNAAPIVGAVNSQGALPGMVWQNRDVYLQGPIWAKIPHTDGNFHPSPLMGGFGLKHPPPQILIKNTPVPADPPTTFNQARLASFITQYSTGQVSVEIEWELQKENSKRWNPEIQYTSNYYKSTNVDFAVNTEGTYSEPRPIGTRYLTRNL

SEQ ID NO: 904 - DNA, 2214 bp, Artificial Sequence
  source: /note="Description of Artificial Sequence: Synthetic polynucleotide"
atggctgccgatggttatcttccagattggctcgaggacaacctctctgagggcattcgcgagtggtgggacctgaaacctggagccccgaaacccaaagccaaccagcaaaagcaggacaacggccggggtctggtgcttcctggctacaagtacctcggacccttcaacggactcgacaagggggagcccgtcaacgcggcggacgcagcggccctcgagcacgacaaggcctacgaccagcagctccaagcgggtgacaatccgtacctgcggtataatcacgccgacgccgagtttcaggagcgtctgcaagaagatacgtcttttgggggcaacctcgggcgcgcagtcttccaggccaaaaagcgggttctcgaacctctgggcctggttgaatcgccggttaagacggctcctggaaagaagagaccggtagagccatcaccccagcgctctccagactcctctacgggcatcggcaagaaaggccagcagcccgcaaaaaagagactcaattttgggcagactggcgactcagagtcagtccccgaccctcaaccaatcggagaaccaccagcagccccctctggtgtgggacctaatacaatggctgcaggcggtggcgctccaatggcagacaataacgaaggcgccgacggagtgggtagttcctcaggaaattggcattgcgattccacatggctgggcgacagagtcatcaccaccagcacccgcacctgggccctgcccacctacaacaaccacctctacaagcaaatctccaacgggacctcgggaggaagcaccaacgacaacacctacttcggctacagcaccccctgggggtattttgacttcaacagattccactgccacttttcaccacgtgactggcagcgactcatcaacaacaactggggattccggcccaagaggctcaacttcaagctcttcaacatccaagtcaaggaggtcacgcagaatgaaggcaccaagaccatcgccaataaccttaccagcacgattcaggtctttacggactcggaataccagctcccgtacgtgctcggctcggcgcaccagggctgcctgcctccgttcccggcggacgtcttcatgattcctcagtacgggtacctgactctgaacaatggcagtcaggctgtgggccggtcgtccttctactgcctggagtactttccttctcaaatgctgagaacgggcaacaactttgaattcagctacaacttcgaggacgtgcccttccacagcagctacgcgcacagccagagcctggaccggctgatgaaccctctcatcgaccagtacttgtactacctgtcccggactcaaagcacgggcggtactgcaggaactcagcagttgctattttctcaggccgggcctaacaacatgtcggctcaggccaagaactggctacccggtccctgctaccggcagcaacgcgtctccacgacactgtcgcagaacaacaacagcaactttgcctggacgggtgccaccaagtatcatctgaatggcagagactctctggtgaatcctggcgttgccatggctacccacaaggacgacgaagagcgattttttccatccagcggagtcttaatgtttgggaaacagggagctggaaaagacaacgtggactatagcagcgtgatgctaaccagcgaggaagaaataaagaccaccaacccagtggccacagaacagtacggcgtggtggccgataacctgcaacagcaaaacgccgctcctattgtaggggccgtcaatagtcaaggagccttacctggcatggtgtggcagaaccgggacgtgtacctgcagggtcccatctgggccaagattcctcatacggacggcaactttcatccctcgccgctgatgggaggctttggactgaagcatccgcctcctcagatcctgattaaaaacacacctgttcccgcggatcctccgaccaccttcaatcaggccaagctggcttctttcatcacgcagtacagtaccggccaggtcagcgtggagatcgagtgggagctgcagaaggagaacagcaaacgctggaacccagagattcagtacacttccaactactacaaatctacaaatgtggactttgctgtcaatactgagggtacttattccgagcctcgccccattggcacccgttacctcacccgtaatctg

SEQ ID NO: 905 - DNA, 2217 bp, Artificial Sequence
  source: /note="Description of Artificial Sequence: Synthetic polynucleotide"
atggctgccgatggttatcttccagattggctcgaggacaacctctctgagggcattcgcgagtggtgggacctgaaacctggagccccgaaacccaaagccaaccagcaaaggcaggacaacggccggggtctggtgcttcctggctacaggtacctcggacccttcaacggactcgacaagggggagcccgtcaacgcggcggacgcagcggccctcgagcacgacagggcctacgaccagcagctccaagcgggtgacaatccgtacctgcggtataatcacgccgacgccgagtttcaggagcgtctgcaagaagatacgtcttttgggggcaacctcgggcgcgcagtcttccaggccaaaaagcgggttctcgaacctctgggcctggttgaatcgccggttaggacggctcctggaaagaagagaccggtagagccatcaccccagcgctctccagactcctctacgggcatcggcaagaaaggccagcagcccgcaagaaagagactcaattttgggcagactggcgactcagagtcagtccccgaccctcaaccaatcggagaaccaccagcagccccctctggtgtgggacctaatacaatggctgcaggcggtggcgctccaatggcagacaataacgaaggcgccgacggagtgggtagttcctcaggaaattggcattgcgattccacatggctgggcgacagagtcatcaccaccagcacccgcacctgggccctgcccacctacaacaaccacctctacaggcaaatctccaacgggacctcgggaggaagcaccaacgacaacacctacttcggctacagcaccccctgggggtattttgacttcaacagattccactgccacttttcaccacgtgactggcagcgactcatcaacaacaactggggattccggcccaagaggctcaacttcaagctcttcaacatccaagtcaaggaggtcacgcagaatgaaggcaccaggaccatcgccaataaccttaccagcacgattcaggtctttacggactcggaataccagctcccgtacgtgctcggctcggcgcaccagggctgcctgcctccgttcccggcggacgtcttcatgattcctcagtacgggtacctgactctgaacaatggcagtcaggctgtgggccggtcgtccttctactgcctggagtactttccttctcaaatgctgagaacgggcaacaactttgaattcagctacaacttcgaggacgtgcccttccacagcagctacgcgcacagccagagcctggaccggctgatgaaccctctcatcgaccagtacttgtactacctgtcccggactcaaagcacgggcggtactgcaggaactcagcagttgctattttctcaggccgggcctaacaacatgtcggctcaggccaagaactggctacccggtccctgctaccggcagcaacgcgtctccacgacactgtcgcagaacaacaacagcaactttgcctggacgggtgccaccaagtatcatctgaatggcagagactctctggtgaatcctggcgttgccatggctacccacagggacgacgaagagcgattttttccatccagcggagtcttaatgtttgggagacagggagctggaagagacaacgtggactatagcagcgtgatgctaaccagcgaggaagaaataaggaccaccaacccagtggccacagaacagtacggcgtggtggccgataacctgcaacagcaaaacgccgctcctattgtaggggccgtcaatagtcaaggagccttacctggcatggtgtggcagaaccgggacgtgtacctgcagggtcccatctgggccaagattcctcatacggacggcaactttcatccctcgccgctgatgggaggctttggactgaagcatccgcctcctcagatcctgattaaaaacacacctgttcccgcggatcctccgaccaccttcaatcaggccaagctggcttctttcatcacgcagtacagtaccggccaggtcagcgtggagatcgagtgggagctgcagaaggagaacagcaaacgctggaacccagagattcagtacacttccaactactacaaatctacaaatgtggactttgctgtcaatactgagggtacttattccgagcctcgccccattggcacccgttacctcacccgtaatctgtaa

SEQ ID NO: 906 - DNA, 2217 bp, Artificial Sequence
  source: /note="Description of Artificial Sequence: Synthetic polynucleotide"
atggctgccgatggttatcttccagattggctcgaggacaacctctctgagggcattcgcgagtggtgggacctgaaacctggagccccgaaacccaaagccaaccagcaaaggcaggacaacggccggggtctggtgcttcctggctacaggtacctcggacccttcaacggactcgacaagggggagcccgtcaacgcggcggacgcagcggccctcgagcacgacagggcctacgaccagcagctccaagcgggtgacaatccgtacctgcggtataatcacgccgacgccgagtttcaggagcgtctgcaagaagatacgtcttttgggggcaacctcgggcgcgcagtcttccaggccaaaaagcgggttctcgaacctctgggcctggttgaatcgccggttaggacggctcctggaaagaagagaccggtagagccatcaccccagcgctctccagactcctctacgggcatcggcaagagaggccagcagcccgcaagaaagagactcaattttgggcagactggcgactcagagtcagtccccgaccctcaaccaatcggagaaccaccagcagccccctctggtgtgggacctaatacaatggctgcaggcggtggcgctccaatggcagacaataacgaaggcgccgacggagtgggtagttcctcaggaaattggcattgcgattccacatggctgggcgacagagtcatcaccaccagcacccgcacctgggccctgcccacctacaacaaccacctctacaggcaaatctccaacgggacctcgggaggaagcaccaacgacaacacctacttcggctacagcaccccctgggggtattttgacttcaacagattccactgccacttttcaccacgtgactggcagcgactcatcaacaacaactggggattccggcccaagaggctcaacttcaagctcttcaacatccaagtcaaggaggtcacgcagaatgaaggcaccaggaccatcgccaataaccttaccagcacgattcaggtctttacggactcggaataccagctcccgtacgtgctcggctcggcgcaccagggctgcctgcctccgttcccggcggacgtcttcatgattcctcagtacgggtacctgactctgaacaatggcagtcaggctgtgggccggtcgtccttctactgcctggagtactttccttctcaaatgctgagaacgggcaacaactttgaattcagctacaacttcgaggacgtgcccttccacagcagctacgcgcacagccagagcctggaccggctgatgaaccctctcatcgaccagtacttgtactacctgtcccggactcaaagcacgggcggtactgcaggaactcagcagttgctattttctcaggccgggcctaacaacatgtcggctcaggccaagaactggctacccggtccctgctaccggcagcaacgcgtctccacgacactgtcgcagaacaacaacagcaactttgcctggacgggtgccaccaagtatcatctgaatggcagagactctctggtgaatcctggcgttgccatggctacccacagggacgacgaagagcgattttttccatccagcggagtcttaatgtttgggaaacagggagctggaagagacaacgtggactatagcagcgtgatgctaaccagcgaggaagaaataaggaccaccaacccagtggccacagaacagtacggcgtggtggccgataacctgcaacagcaaaacgccgctcctattgtaggggccgtcaatagtcaaggagccttacctggcatggtgtggcagaaccgggacgtgtacctgcagggtcccatctgggccaagattcctcatacggacggcaactttcatccctcgccgctgatgggaggctttggactgaagcatccgcctcctcagatcctgattaaaaacacacctgttcccgcggatcctccgaccaccttcaatcaggccaagctggcttctttcatcacgcagtacagtaccggccaggtcagcgtggagatcgagtgggagctgcagaaggagaacagcaaacgctggaacccagagattcagtacacttccaactactacaaatctacaaatgtggactttgctgtcaatactgagggtacttattccgagcctcgccccattggcacccgttacctcacccgtaatctgtaa

SEQ ID NO: 907 - DNA, 2217 bp, Artificial Sequence
  source: /note="Description of Artificial Sequence: Synthetic polynucleotide"
atggctgccgatggttatcttccagattggctcgaggacaacctctctgagggcattcgcgagtggtgggacctgaaacctggagccccgaaacccaaagccaaccagcaaaggcaggacaacggccggggtctggtgcttcctggctacaggtacctcggacccttcaacggactcgacaagggggagcccgtcaacgcggcggacgcagcggccctcgagcacgacagggcctacgaccagcagctccaagcgggtgacaatccgtacctgcggtataatcacgccgacgccgagtttcaggagcgtctgcaagaagatacgtcttttgggggcaacctcgggcgcgcagtcttccaggccaaaaagcgggttctcgaacctctgggcctggttgaatcgccggttaggacggctcctggaaagaagagaccggtagagccatcaccccagcgctctccagactcctctacgggcatcggcaagagaggccagcagcccgcaaaaaagagactcaattttgggcagactggcgactcagagtcagtccccgaccctcaaccaatcggagaaccaccagcagccccctctggtgtgggacctaatacaatggctgcaggcggtggcgctccaatggcagacaataacgaaggcgccgacggagtgggtagttcctcaggaaattggcattgcgattccacatggctgggcgacagagtcatcaccaccagcacccgcacctgggccctgcccacctacaacaaccacctctacaggcaaatctccaacgggacctcgggaggaagcaccaacgacaacacctacttcggctacagcaccccctgggggtattttgacttcaacagattccactgccacttttcaccacgtgactggcagcgactcatcaacaacaactggggattccggcccaagaggctcaacttcaagctcttcaacatccaagtcaaggaggtcacgcagaatgaaggcaccaggaccatcgccaataaccttaccagcacgattcaggtctttacggactcggaataccagctcccgtacgtgctcggctcggcgcaccagggctgcctgcctccgttcccggcggacgtcttcatgattcctcagtacgggtacctgactctgaacaatggcagtcaggctgtgggccggtcgtccttctactgcctggagtactttccttctcaaatgctgagaacgggcaacaactttgaattcagctacaacttcgaggacgtgcccttccacagcagctacgcgcacagccagagcctggaccggctgatgaaccctctcatcgaccagtacttgtactacctgtcccggactcaaagcacgggcggtactgcaggaactcagcagttgctattttctcaggccgggcctaacaacatgtcggctcaggccaagaactggctacccggtccctgctaccggcagcaacgcgtctccacgacactgtcgcagaacaacaacagcaactttgcctggacgggtgccaccaagtatcatctgaatggcagagactctctggtgaatcctggcgttgccatggctacccacagggacgacgaagagcgattttttccatccagcggagtcttaatgtttgggagacagggagctggaagagacaacgtggactatagcagcgtgatgctaaccagcgaggaagaaataaggaccaccaacccagtggccacagaacagtacggcgtggtggccgataacctgcaacagcaaaacgccgctcctattgtaggggccgtcaatagtcaaggagccttacctggcatggtgtggcagaaccgggacgtgtacctgcagggtcccatctgggccaagattcctcatacggacggcaactttcatccctcgccgctgatgggaggctttggactgaagcatccgcctcctcagatcctgattaaaaacacacctgttcccgcggatcctccgaccaccttcaatcaggccaagctggcttctttcatcacgcagtacagtaccggccaggtcagcgtggagatcgagtgggagctgcagaaggagaacagcaaacgctggaacccagagattcagtacacttccaactactacaaatctacaaatgtggactttgctgtcaatactgagggtacttattccgagcctcgccccattggcacccgttacctcacccgtaatctgtaa

SEQ ID NO: 908 - DNA, 2217 bp, Artificial Sequence
  source: /note="Description of Artificial Sequence: Synthetic polynucleotide"
atggctgccgatggttatcttccagattggctcgaggacaacctctctgagggcattcgcgagtggtgggacctgaaacctggagccccgaaacccaaagccaaccagcaaaggcaggacaacggccggggtctggtgcttcctggctacaggtacctcggacccttcaacggactcgacaagggggagcccgtcaacgcggcggacgcagcggccctcgagcacgacagggcctacgaccagcagctccaagcgggtgacaatccgtacctgcggtataatcacgccgacgccgagtttcaggagcgtctgcaagaagatacgtcttttgggggcaacctcgggcgcgcagtcttccaggccaaaaagcgggttctcgaacctctgggcctggttgaatcgccggttaggacggctcctggaaagaagagaccggtagagccatcaccccagcgctctccagactcctctacgggcatcggcaagagaggccagcagcccgcaaaaaagagactcaattttgggcagactggcgactcagagtcagtccccgaccctcaaccaatcggagaaccaccagcagccccctctggtgtgggacctaatacaatggctgcaggcggtggcgctccaatggcagacaataacgaaggcgccgacggagtgggtagttcctcaggaaattggcattgcgattccacatggctgggcgacagagtcatcaccaccagcacccgcacctgggccctgcccacctacaacaaccacctctacaggcaaatctccaacgggacctcgggaggaagcaccaacgacaacacctacttcggctacagcaccccctgggggtattttgacttcaacagattccactgccacttttcaccacgtgactggcagcgactcatcaacaacaactggggattccggcccaagaggctcaacttcaagctcttcaacatccaagtcaaggaggtcacgcagaatgaaggcaccaggaccatcgccaataaccttaccagcacgattcaggtctttacggactcggaataccagctcccgtacgtgctcggctcggcgcaccagggctgcctgcctccgttcccggcggacgtcttcatgattcctcagtacgggtacctgactctgaacaatggcagtcaggctgtgggccggtcgtccttctactgcctggagtactttccttctcaaatgctgagaacgggcaacaactttgaattcagctacaacttcgaggacgtgcccttccacagcagctacgcgcacagccagagcctggaccggctgatgaaccctctcatcgaccagtacttgtactacctgtcccggactcaaagcacgggcggtactgcaggaactcagcagttgctattttctcaggccgggcctaacaacatgtcggctcaggccaagaactggctacccggtccctgctaccggcagcaacgcgtctccacgacactgtcgcagaacaacaacagcaactttgcctggacgggtgccaccaagtatcatctgaatggcagagactctctggtgaatcctggcgttgccatggctacccacagggacgacgaagagcgattttttccatccagcggagtcttaatgtttgggaaacagggagctggaagagacaacgtggactatagcagcgtgatgctaaccagcgaggaagaaataaggaccaccaacccagtggccacagaacagtacggcgtggtggccgataacctgcaacagcaaaacgccgctcctattgtaggggccgtcaatagtcaaggagccttacctggcatggtgtggcagaaccgggacgtgtacctgcagggtcccatctgggccaagattcctcatacggacggcaactttcatccctcgccgctgatgggaggctttggactgaagcatccgcctcctcagatcctgattaaaaacacacctgttcccgcggatcctccgaccaccttcaatcaggccaggctggcttctttcatcacgcagtacagtaccggccaggtcagcgtggagatcgagtgggagctgcagaaggagaacagcaaacgctggaacccagagattcagtacacttccaactactacaaatctacaaatgtggactttgctgtcaatactgagggtacttattccgagcctcgccccattggcacccgttacctcacccgtaatctgtaa

SEQ ID NO: 909 - DNA, 2217 bp, Artificial Sequence
  source: /note="Description of Artificial Sequence: Synthetic polynucleotide"
atggctgccgatggttatcttccagattggctcgaggacaacctctctgagggcattcgcgagtggtgggacctgaaacctggagccccgaaacccaaagccaaccagcaaaggcaggacaacggccggggtctggtgcttcctggctacaggtacctcggacccttcaacggactcgacaagggggagcccgtcaacgcggcggacgcagcggccctcgagcacgacagggcctacgaccagcagctccaagcgggtgacaatccgtacctgcggtataatcacgccgacgccgagtttcaggagcgtctgcaagaagatacgtcttttgggggcaacctcgggcgcgcagtcttccaggccaaaaagcgggttctcgaacctctgggcctggttgaatcgccggttaggacggctcctggaaagaagagaccggtagagccatcaccccagcgctctccagactcctctacgggcatcggcaagaaaggccagcagcccgcaaaaaagagactcaattttgggcagactggcgactcagagtcagtccccgaccctcaaccaatcggagaaccaccagcagccccctctggtgtgggacctaatacaatggctgcaggcggtggcgctccaatggcagacaataacgaaggcgccgacggagtgggtagttcctcaggaaattggcattgcgattccacatggctgggcgacagagtcatcaccaccagcacccgcacctgggccctgcccacctacaacaaccacctctacaggcaaatctccaacgggacctcgggaggaagcaccaacgacaacacctacttcggctacagcaccccctgggggtattttgacttcaacagattccactgccacttttcaccacgtgactggcagcgactcatcaacaacaactggggattccggcccaagaggctcaacttcaagctcttcaacatccaagtcaaggaggtcacgcagaatgaaggcaccaggaccatcgccaataaccttaccagcacgattcaggtctttacggactcggaataccagctcccgtacgtgctcggctcggcgcaccagggctgcctgcctccgttcccggcggacgtcttcatgattcctcagtacgggtacctgactctgaacaatggcagtcaggctgtgggccggtcgtccttctactgcctggagtactttccttctcaaatgctgagaacgggcaacaactttgaattcagctacaacttcgaggacgtgcccttccacagcagctacgcgcacagccagagcctggaccggctgatgaaccctctcatcgaccagtacttgtactacctgtcccggactcaaagcacgggcggtactgcaggaactcagcagttgctattttctcaggccgggcctaacaacatgtcggctcaggccaagaactggctacccggtccctgctaccggcagcaacgcgtctccacgacactgtcgcagaacaacaacagcaactttgcctggacgggtgccaccaagtatcatctgaatggcagagactctctggtgaatcctggcgttgccatggctacccacagggacgacgaagagcgattttttccatccagcggagtcttaatgtttgggagacagggagctggaagagacaacgtggactatagcagcgtgatgctaaccagcgaggaagaaataaggaccaccaacccagtggccacagaacagtacggcgtggtggccgataacctgcaacagcaaaacgccgctcctattgtaggggccgtcaatagtcaaggagccttacctggcatggtgtggcagaaccgggacgtgtacctgcagggtcccatctgggccaagattcctcatacggacggcaactttcatccctcgccgctgatgggaggctttggactgaagcatccgcctcctcagatcctgattaaaaacacacctgttcccgcggatcctccgaccaccttcaatcaggccaggctggcttctttcatcacgcagtacagtaccggccaggtcagcgtggagatcgagtgggagctgcagaaggagaacagcaaacgctggaacccagagattcagtacacttccaactactacaaatctacaaatgtggactttgctgtcaatactgagggtacttattccgagcctcgccccattggcacccgttacctcacccgtaatctgtaa

SEQ ID NO: 910 - protein, 744 aa, Artificial Sequence
  source: /note="Description of Artificial Sequence: Synthetic polypeptide"
MAADGYLPDWLEDTLSEGIRQWWKLKPGPPPPKPAERHKDDSRGLVLPGYKYLGPFNGLDKGEPVNEADAAALEHDKAYDRQLDSGDNPYLKYNHADAEFQERLKEDTSFGGNLGRAVFQAKKRVLEPLGLVEEPVKTAPGKKRPVEHSPVEPDSSSGTGKAGQQPARKRLNFGQTGDADSVPDPQPLGQPPAAPSGLGTNTMATGSGAPMADNNEGADGVGNSSGNWHCDSTWMGDRVITTSTRTWALPTYNNHLYKQISSQSGASNDNHYFGYSTPWGYFDFNRFHCHFSPRDWQRLINNNWGFRPKRLNFKLFNIQVKEVTQNDGTTTIANNLTSTVQVFTDSEYQLPYVLGSAHQGCLPPFPADVFMVPQYGYLTLNNGSQAVGRSSFYCLEYFPSQMLRTGNNFTFSYTFEDVPFHSSYAHSQSLDRLMNPLIDQYLYYLSRTNTPSGTTTQSRLQFSQAGASDIRDQSRNWLPGPCYRQQRVSKTSADNNNSEYSWTGATKYHLNGRDSLVNPGPAMASHKDDEEKFFPQSGVLIFGKQGSEKTNVDIEKVMITDEEEIRTTNPVATEQYGSVSTNLQRGQRGESGHGYFAQAATADVNTQGVLPGMVWQDRDVYLQGPIWAKIPHTDGHFHPSPLMGGFGLKHPPPQILIKNTPVPANPSTTFSAAKFASFITQYSTGQVSVEIEWELQKENSKRWNPEIQYTSNYNKSVNVDFTVDTNGVYSEPRPIGTRYLTRNL

SEQ ID NO: 911 - DNA, 8359 bp, Artificial Sequence
  source: /note="Description of Artificial Sequence: Synthetic polynucleotide"
catcatcaataatataccttattttggattgaagccaatatgataatgagggggtggagtttgtgacgtggcgcggggcgtgggaacggggcgggtgacgtagtagctctagaggtcctgtattagaggtcacgtgagtgttttgcgacattttgcgacaccatgtggtcacgctgggtatttaagcccgagtgagcacgcagggtctccattttgaagcgggaggtttgaacgcgcagccgccatgccggggttttacgagattgtgattaaggtccccagcgaccttgacgagcatctgcccggcatttctgacagctttgtgaactgggtggccgagaaggaatgggagttgccgccagattctgacatggatctgaatctgattgagcaggcacccctgaccgtggccgagaagctgcagcgcgactttctgacggaatggcgccgtgtgagtaaggcaccggaggcccttttctttgtgcaatttgagaagggagagagctacttccacatgcacgtgctcgtggaaaccaccggggtgaaatccatggttttgggacgtttcctgagtcagattcgcgaaaaactgattcagagaatttaccgcgggatcgagccgactttgccaaactggttcgcggtcacaaagaccagaaatggcgccggaggcgggaacaaggtggtggatgagtgctacatccccaattacttgctccccaaaacccagcctgagctccagtgggcgtggactaatatggaacagtatttaagcgcctgtttgaatctcacggagcgtaaacggttggtggcgcagcatctgacgcacgtgtcgcagacgcaggagcagaacaaagagaatcagaatcccaattctgatgcgccggtgatcagatcaaaaacttcagccaggtacatggagctggtcgggtggctcgtggacaaggggattacctcggagaagcagtggatccaggaggaccaggcctcatacatctccttcaatgcggcctccaactcgcggtcccaaatcaaggctgccttggacaatgcgggaaagattatgagcctgactaaaaccgcccccgactacctggtgggccagcagcccgtggaggacatttccagcaatcggatttataaaattttggaactaaacgggtacgatccccaatatgcggcttccgtctttctgggatgggccacgaaaaagttcggcaagaggaacaccatctggctgtttgggcctgcaactaccgggaagaccaacatcgcggaggccatagcccacactgtgcccttctacgggtgcgtaaactggaccaatgagaactttcccttcaacgactgtgtcgacaagatggtgatctggtgggaggaggggaagatgaccgccaaggtcgtggagtcggccaaagccattctcggaggaagcaaggtgcgcgtggaccagaaatgcaagtcctcggcccagatagacccgactcccgtgatcgtcacctccaacaccaacatgtgcgccgtgattgacgggaactcaacgaccttcgaacaccagcagccgttgcaagaccggatgttcaaatttgaactcacccgccgtctggatcatgactttgggaaggtcaccaagcaggaagtcaaagactttttccggtgggcaaaggatcacgtggttgaggtggagcatgaattctacgtcaaaaagggtggagccaagaaaagacccgcccccagtgacgcagatataagtgagcccaaacgggtgcgcgagtcagttgcgcagccatcgacgtcagacgcggaagcttcgatcaactacgcagacaggtaccaaaacaaatgttctcgtcacgtgggcatgaatctgatgctgtttccctgcagacaatgcgagagaatgaatcagaattcaaatatctgcttcactcacggacagaaagactgtttagagtgctttcccgtgtcagaatctcaacccgtttctgtcgtcaaaaaggcgtatcagaaactgtgctacattcatcatatcatgggaaaggtgccagacgcttgcactgcctgcgatctggtcaatgtggatttggatgactgcatctttgaacaataaatgatttaaatcaggtatggctgccgatggttatcttccagattggctcgaggacactctctctgaaggaataagacagtggtggaagctcaaacctggcccaccaccaccaaagcccgcagagcggcataaggacgacagcaggggtcttgtgcttcctgggtacaagtacctcggacccttcaacggactcgacaagggagagccggtcaacgaggcagacgccgcggccctcgagcacgacaaagcctacgaccggcagctcgacagcggagacaacccgtacctcaagtacaaccacgccgacgcggagtttcaggagcgccttaaagaagatacgtcttttgggggcaacctcggacgagcagtcttccaggcgaaaaagagggttcttgaacctctgggcctggttgaggaacctgttaagacggctccgggaaaaaagaggccggtagagcactctcctgtggagccagactcctcctcgggaaccggaaaggcgggccagcagcctgcaagaaaaagattgaattttggtcagactggagacgcagactcagtacctgacccccagcctctcggacagccaccagcagccccctctggtctgggaactaatacgatggctacaggcagtggcgcaccaatggcagacaataacgagggcgccgacggagtgggtaattcctcgggaaattggcattgcgattccacatggatgggcgacagagtcatcaccaccagcacccgaacctgggccctgcccacctacaacaaccacctctacaaacaaatttccagccaatcaggagcctcgaacgacaatcactactttggctacagcaccccttgggggtattttgacttcaacagattccactgccacttttcaccacgtgactggcaaagactcatcaacaacaactggggattccgacccaagagactcaacttcaagctctttaacattcaagtcaaagaggtcacgcagaatgacggtacgacgacgattgccaataaccttaccagcacggttcaggtgtttactgactcggagtaccagctcccgtacgtcctcggctcggcgcatcaaggatgcctcccgccgttcccagcagacgtcttcatggtgccacagtatggatacctcaccctgaacaacgggagtcaggcagtaggacgctcttcattttactgcctggagtactttccttctcagatgctgcgtaccggaaacaactttaccttcagctacacttttgaggacgttcctttccacagcagctacgctcacagccagagtctggaccgtctcatgaatcctctcatcgaccagtacctgtattacttgagcagaacaaacactccaagtggaaccaccacgcagtcaaggcttcagttttctcaggccggagcgagtgacattcgggaccagtctaggaactggcttcctggaccctgttaccgccagcagcgagtatcaaagacatctgcggataacaacaacagtgaatactcgtggactggagctaccaagtaccacctcaatggcagagactctctggtgaatccgggcccggccatggcaagccacaaggacgatgaagaaaagttttttcctcagagcggggttctcatctttgggaagcaaggctcagagaaaacaaatgtggacattgaaaaggtcatgattacagacgaagaggaaatcaggacaaccaatcccgtggctacggagcagtatggttctgtatctaccaacctccagagaggccagagaggcgagtctggtcatggttattttgcccaggcggccaccgcagatgtcaacacacaaggcgttcttccaggcatggtctggcaggacagagatgtgtaccttcaggggcccatctgggcaaagattccacacacggacggacattttcacccctctcccctcatgggtggattcggacttaaacaccctcctccacagattctcatcaagaacaccccggtacctgcgaatccttcgaccaccttcagtgcggcaaagtttgcttccttcatcacacagtactccacgggacaggtcagcgtggagatcgagtgggagctgcagaaggaaaacagcaaacgctggaatcccgaaattcagtacacttccaactacaacaagtctgttaatgtggactttactgtggacactaatggcgtgtattcagagcctcgccccattggcaccagatacctgactcgtaatctgtaattgcttgttaatcaataaaccgtttaattcgtttcagttgaactttggtctctgcgtatttctttcttatctagtttccatgctctagaggtcctgtattagaggtcacgtgagtgttttgcgacattttgcgacaccatgtggtcacgctgggtatttaagcccgagtgagcacgcagggtctccattttgaagcgggaggtttgaacgcgcagccaccacggcggggttttacgagattgtgattaaggtccccagcgaccttgacgagcatctgcccggcatttctgacagctttgtgaactgggtggccgagaaggaatgggagttgccgccagattctgacatggatctgaatctgattgagcaggcacccctgaccgtggccgagaagctgcatcgctggcgtaatagcgaagaggcccgcaccgatcgcccttcccaacagttgcgcagcctgaatggcgaatggcgattccgttgcaatggctggcggtaatattgttctggatattaccagcaaggccgatagtttgagttcttctactcaggcaagtgatgttattactaatcaaagaagtattgcgacaacggttaatttgcgtgatggacagactcttttactcggtggcctcactgattataaaaacacttctcaggattctggcgtaccgttcctgtctaaaatccctttaatcggcctcctgtttagctcccgctctgattctaacgaggaaagcacgttatacgtgctcgtcaaagcaaccatagtacgcgccctgtagcggcgcattaagcgcggcgggtgtggtggttacgcgcagcgtgaccgctacacttgccagcgccctagcgcccgctcctttcgctttcttcccttcctttctcgccacgttcgccggctttccccgtcaagctctaaatcgggggctccctttagggttccgatttagtgctttacggcacctcgaccccaaaaaacttgattagggtgatggttcacgtagtgggccatcgccctgatagacggtttttcgccctttgacgttggagtccacgttctttaatagtggactcttgttccaaactggaacaacactcaaccctatctcggtctattcttttgatttataagggattttgccgatttcggcctattggttaaaaaatgagctgatttaacaaaaatttaacgcgaattttaacaaaatattaacgtttacaatttaaatatttgcttatacaatcttcctgtttttggggcttttctgattatcaaccggggtacatatgattgacatgctagttttacgattaccgttcatcgattctcttgtttgctccagactctcaggcaatgacctgatagcctttgtagagacctctcaaaaatagctaccctctccggcatgaatttatcagctagaacggttgaatatcatattgatggtgatttgactgtctccggcctttctcacccgtttgaatctttacctacacattactcaggcattgcatttaaaatatatgagggttctaaaaatttttatccttgcgttgaaataaaggcttctcccgcaaaagtattacagggtcataatgtttttggtacaaccgatttagctttatgctctgaggctttattgcttaattttgctaattctttgccttgcctgtatgatttattggatgttggaattcctgatgcggtattttctccttacgcatctgtgcggtatttcacaccgcatatggtgcactctcagtacaatctgctctgatgccgcatagttaagccagccccgacacccgccaacacccgctgacgcgccctgacgggcttgtctgctcccggcatccgcttacagacaagctgtgaccgtctccgggagctgcatgtgtcagaggttttcaccgtcatcaccgaaacgcgcgagacgaaagggcctcgtgatacgcctatttttataggttaatgtcatgataataatggtttcttagacgtcaggtggcacttttcggggaaatgtgcgcggaacccctatttgtttatttttctaaatacattcaaatatgtatccgctcatgagacaataaccctgataaatgcttcaataatattgaaaaaggaagagtatgagtattcaacatttccgtgtcgcccttattcccttttttgcggcattttgccttcctgtttttgctcacccagaaacgctggtgaaagtaaaagatgctgaagatcagttgggtgcacgagtgggttacatcgaactggatctcaacagcggtaagatccttgagagttttcgccccgaagaacgttttccaatgatgagcacttttaaagttctgctatgtggcgcggtattatcccgtattgacgccgggcaagagcaactcggtcgccgcatacactattctcagaatgacttggttgagtactcaccagtcacagaaaagcatcttacggatggcatgacagtaagagaattatgcagtgctgccataaccatgagtgataacactgcggccaacttacttctgacaacgatcggaggaccgaaggagctaaccgcttttttgcacaacatgggggatcatgtaactcgccttgatcgttgggaaccggagctgaatgaagccataccaaacgacgagcgtgacaccacgatgcctgtagcaatggcaacaacgttgcgcaaactattaactggcgaactacttactctagcttcccggcaacaattaatagactggatggaggcggataaagttgcaggaccacttctgcgctcggcccttccggctggctggtttattgctgataaatctggagccggtgagcgtgggtctcgcggtatcattgcagcactggggccagatggtaagccctcccgtatcgtagttatctacacgacggggagtcaggcaactatggatgaacgaaatagacagatcgctgagataggtgcctcactgattaagcattggtaactgtcagaccaagtttactcatatatactttagattgatttaaaacttcatttttaatttaaaaggatctaggtgaagatcctttttgataatctcatgaccaaaatcccttaacgtgagttttcgttccactgagcgtcagaccccgtagaaaagatcaaaggatcttcttgagatcctttttttctgcgcgtaatctgctgcttgcaaacaaaaaaaccaccgctaccagcggtggtttgtttgccggatcaagagctaccaactctttttccgaaggtaactggcttcagcagagcgcagataccaaatactgtccttctagtgtagccgtagttaggccaccacttcaagaactctgtagcaccgcctacatacctcgctctgctaatcctgttaccagtggctgctgccagtggcgataagtcgtgtcttaccgggttggactcaagacgatagttaccggataaggcgcagcggtcgggctgaacggggggttcgtgcacacagcccagcttggagcgaacgacctacaccgaactgagatacctacagcgtgagctatgagaaagcgccacgcttcccgaagggagaaaggcggacaggtatccggtaagcggcagggtcggaacaggagagcgcacgagggagcttccagggggaaacgcctggtatctttatagtcctgtcgggtttcgccacctctgacttgagcgtcgatttttgtgatgctcgtcaggggggcggagcctatggaaaaacgccagcaacgcggcctttttacggttcctggccttttgctggccttttgctcacatgttctttcctgcgttatcccctgattctgtggataaccgtattaccgcctttgagtgagctgataccgctcgccgcagccgaacgaccgagcgcagcgagtcagtgagcgaggaagcggaagagcgcccaatacgcaaaccgcctctccccgcgcgttggccgattcattaatgcagaattcc

SEQ ID NO: 912 - protein, 736 aa, Artificial Sequence
  source: /note="Description of Artificial Sequence: Synthetic polypeptide"
  VARIANT (168)..(168): /replace="Arg"
  VARIANT (204)..(204): /replace="Ser"
  VARIANT (266)..(266): /replace="Gly"
  VARIANT (311)..(311): /replace="Lys"
  VARIANT (411)..(411): /replace="Gln"
  VARIANT (460)..(460): /replace="Glu"
  VARIANT (493)..(493): /replace="Thr"
  VARIANT (562)..(562): /replace="Asn"
  VARIANT (576)..(576): /replace="Glu"
  VARIANT (587)..(587): /replace="Ala"
  VARIANT (609)..(609): /replace="Asp
  SITE (1)..(736): /note="Variant residues given in the sequence have no preference with respect to those in the annotations for variant positions"
MAADGYLPDWLEDNLSEGIREWWDLKPGAPKPKANQQKQDDGRGLVLPGYKYLGPFNGLDKGEPVNAADAAALEHDKAYDQQLKAGDNPYLRYNHADAEFQERLQEDTSFGGNLGRAVFQAKKRVLEPLGLVEEGAKTAPGKKRPVEQSPQEPDSSSGIGKKGQQPAKKRLNFGQTGDSESVPDPQPLGEPPAAPSGVGSNTMAAGGGAPMADNNEGADGVGNASGNWHCDSTWLGDRVITTSTRTWALPTYNNHLYKQISSQSGASTNDNTYFGYSTPWGYFDFNRFHCHFSPRDWQRLINNNWGFRPKRLNFKLFNIQVKEVTTNDGTTTIANNLTSTVQVFTDSEYQLPYVLGSAHQGCLPPFPADVFMIPQYGYLTLNNGSQAVGRSSFYCLEYFPSQMLRTGNNFEFSYTFEDVPFHSSYAHSQSLDRLMNPLIDQYLYYLSRTQTTSGTAGNRTLQFSQAGPSSMANQAKNWLPGPCYRQQRVSKTANQNNNSNFAWTGATKYHLNGRDSLVNPGPAMATHKDDEDKFFPMSGVLIFGKQGAGNSNVDLDNVMITSEEEIKTTNPVATEQYGTVATNLQSSNTAPATGTVNSQGALPGMVWQNRDVYLQGPIWAKIPHTDGHFHPSPLMGGFGLKHPPPQILIKNTPVPANPPTTFSPAKFASFITQYSTGQVSVEIEWELQKENSKRWNPEIQYTSNYNKSTNVDFAVDTNGVYSEPRPIGTRYLTRNL

SEQ ID NO: 913 - DNA, 2208 bp, Artificial Sequence
  source: /note="Description of Artificial Sequence: Synthetic polynucleotide"
  variation (502)..(504): /replace="agg"
  variation (610)..(612): /replace="agc"
  variation (796)..(798): /replace="ggc"
  variation (931)..(933): /replace="aag"
  variation (1231)..(1233): /replace="cag"
  variation (1378)..(1380): /replace="gag"
  variation (1477)..(1479): /replace="acc"
  variation (1684)..(1686): /replace="aac"
  variation (1726)..(1728): /replace="gag"
  variation (1759)..(1761): /replace="gcc"
  variation (1825)..(1827): /replace="gac"
  misc_feature (1)..(2208): /note="Variant residues given in the sequence have no preference with respect to those in the annotations for variant positions"
atggctgccgatggttatcttccagattggctcgaggacaacctctctgagggcattcgcgagtggtgggacttgaaacctggagccccgaaacccaaagccaaccagcaaaagcaggacgacggccggggtctggtgcttcctggctacaagtacctcggacccttcaacggactcgacaagggggagcccgtcaacgcggcggacgcagcggccctcgagcacgacaaggcctacgaccagcagctcaaagcgggtgacaatccgtacctgcggtataaccacgccgacgccgagtttcaggagcgtctgcaagaagatacgtcttttgggggcaacctcgggcgagcagtcttccaggccaagaagcgggttctcgaacctctcggtctggttgaggaaggcgctaagacggctcctggaaagaagagaccggtagagcaatcaccccaggaaccagactcctcttcgggcatcggcaagaaaggccagcagcccgcgaagaagagactcaactttgggcagacaggcgactcagagtcagtgcccgaccctcaaccactcggagaaccccccgcagccccctctggtgtgggatctaatacaatggcagcaggcggtggcgctccaatggcagacaataacgaaggcgccgacggagtgggtaacgcctcaggaaattggcattgcgattccacatggctgggcgacagagtcatcaccaccagcacccgaacctgggccctccccacctacaacaaccacctctacaagcaaatctccagccaatcgggagcaagcaccaacgacaacacctacttcggctacagcaccccctgggggtattttgactttaacagattccactgccacttctcaccacgtgactggcagcgactcatcaacaacaactggggattccggcccaagagactcaacttcaagctcttcaacatccaggtcaaggaggtcacgacgaatgatggcaccacgaccatcgccaataaccttaccagcacggttcaggtctttacggactcggaataccagctcccgtacgtcctcggctctgcgcaccagggctgcctgcctccgttcccggcggacgtcttcatgattcctcagtacgggtacctgactctgaacaatggcagtcaggccgtgggccgttcctccttctactgcctggagtactttccttctcaaatgctgagaacgggcaacaactttgagttcagctacacgtttgaggacgtgccttttcacagcagctacgcgcacagccaaagcctggaccggctgatgaaccccctcatcgaccagtacctgtactacctgtctcggactcagaccacgagtggtaccgcaggaaatcggacgttgcaattttctcaggccgggcctagtagcatggcgaatcaggccaaaaactggctacccgggccctgctaccggcagcaacgcgtctccaagacagcgaatcaaaataacaacagcaactttgcctggaccggtgccaccaagtatcatctgaatggcagagactctctggtaaatcccggtcccgctatggcaacccacaaggacgacgaagacaaattttttccgatgagcggagtcttaatatttgggaaacagggagctggaaatagcaacgtggaccttgacaacgttatgataaccagtgaggaagaaattaaaaccaccaacccagtggccacagaacagtacggcacggtggccactaacctgcaatcgtcaaacaccgctcctgctacagggaccgtcaacagtcaaggagccttacctggcatggtctggcagaaccgggacgtgtacctgcagggtcctatctgggccaagattcctcacacggacggacactttcatccctcgccgctgatgggaggctttggactgaaacacccgcctcctcagatcctgattaagaatacacctgttcccgcgaatcctccaactaccttcagtccagctaagtttgcgtcgttcatcacgcagtacagcaccggacaggtcagcgtggaaattgaatgggagctgcagaaagaaaacagcaaacgctggaacccagagattcaatacacttccaactacaacaaatctacaaatgtggactttgctgttgacacaaatggcgtttattctgagcctcgccccatcggcacccgttacctcacccgtaatctg

SEQ ID NO: 914 - protein, 737 aa, Artificial Sequence
  source: /note="Description of Artificial Sequence: Synthetic polypeptide"
  VARIANT (157)..(157): /replace="Ser"
  VARIANT (168)..(168): /replace="Arg"
  VARIANT (262)..(262): /replace="Ser"
  VARIANT (263)..(263): /replace="His"
  VARIANT (312)..(312): /replace="Lys"
  VARIANT (412)..(412): /replace="Gln"
  VARIANT (460)..(460): /replace="Gln"
  VARIANT (461)..(461): /replace="Glu"
  VARIANT (552)..(552): /replace="Ser"
  VARIANT (556)..(556): /replace="Tyr"
  VARIANT (557)..(557): /replace="Ser"
  VARIANT (563)..(563): /replace="Asn"
  VARIANT (580)..(580): /replace="Ile"
  VARIANT (588)..(588): /replace="Ser"
  VARIANT (664)..(664): /replace="Thr
  SITE (1)..(737): /note="Variant residues given in the sequence have no preference with respect to those in the annotations for variant positions"
MAADGYLPDWLEDNLSEGIREWWDLKPGAPKPKANQQKQDDGRGLVLPGYKYLGPFNGLDKGEPVNAADAAALEHDKAYDQQLKAGDNPYLRYNHADAEFQERLQEDTSFGGNLGRAVFQAKKRVLEPLGLVEEGAKTAPGKKRPVEQSPQEPDSSTGIGKKGQQPAKKRLNFGQTGDSESVPDPQPLGEPPAAPSGVGSNTMAAGGGAPMADNNEGADGVGNASGNWHCDSTWLGDRVITTSTRTWALPTYNNHLYKQISNSQSGGSTNDNTYFGYSTPWGYFDFNRFHCHFSPRDWQRLINNNWGFRPKRLNFKLFNIQVKEVTTNDGTTTIANNLTSTVQVFTDSEYQLPYVLGSAHQGCLPPFPADVFMIPQYGYLTLNNGSQAVGRSSFYCLEYFPSQMLRTGNNFEFSYTFEDVPFHSSYAHSQSLDRLMNPLIDQYLYYLSRTQTTGGTAGNRTLQFSQAGPSSMANQAKNWLPGPCYRQQRVSKTTNQNNNSNFAWTGATKYHLNGRDSLVNPGVAMATHKDDEDRFFPSSGVLIFGKQGAGNDNVDLDNVMITSEEEIKTTNPVATEEYGVVATNLQSANTAPQTGTVNSQGALPGMVWQNRDVYLQGPIWAKIPHTDGNFHPSPLMGGFGLKHPPPQILIKNTPVPANPPTTFSPAKFASFITQYSTGQVSVEIEWELQKENSKRWNPEIQYTSNYNKSTNVDFAVDTEGVYSEPRPIGTRYLTRNL

SEQ ID NO: 915 - DNA, 2211 bp, Artificial Sequence
  source: /note="Description of Artificial Sequence: Synthetic polynucleotide"
  variation (469)..(471): /replace="agc"
  variation (502)..(504): /replace="aga"
  variation (784)..(786): /replace="agt"
  variation (787)..(789): /replace="cac"
  variation (934)..(936): /replace="aag"
  variation (1234)..(1236): /replace="cag"
  variation (1378)..(1380): /replace="cag"
  variation (1381)..(1383): /replace="gag"
  variation (1654)..(1656): /replace="agc"
  variation (1666)..(1668): /replace="tac"
  variation (1669)..(1671): /replace="agc"
  variation (1687)..(1689): /replace="aac"
  variation (1738)..(1740): /replace="atc"
  variation (1762)..(1764): /replace="agc"
  variation (1990)..(1992): /replace="acc"
  misc_feature (1)..(2211): /note="Variant residues given in the sequence have no preference with respect to those in the annotations for variant positions"
atggctgccgatggttatcttccagattggctcgaggacaacctctctgagggcattcgcgagtggtgggacttgaaacctggagccccgaaacccaaagccaaccagcaaaagcaggacgacggccggggtctggtgcttcctggctacaagtacctcggacccttcaacggactcgacaagggggagcccgtcaacgcggcggacgcagcggccctcgagcacgacaaggcctacgaccagcagctcaaagcgggtgacaatccgtacctgcggtataaccacgccgacgccgagtttcaggagcgtctgcaagaagatacgtcttttgggggcaacctcgggcgagcagtcttccaggccaagaagcgggttctcgaacctctcggtctggttgaggaaggcgctaagacggctcctggaaagaagagaccggtagagcaatcaccccaggaaccagactcctctacgggcatcggcaagaaaggccagcagcccgcgaaaaagagactcaactttgggcagactggcgactcagagtcagtgcccgaccctcaaccactcggagaaccccccgcagccccctctggtgtgggatctaatacaatggctgcaggcggtggcgctccaatggcagacaataacgaaggcgccgacggagtgggtaatgcctcaggaaattggcattgcgattccacatggctgggcgacagagtcatcaccaccagcacccgaacctgggccctccccacctacaacaaccacctctacaagcaaatctccaacagccaatcgggaggaagcaccaacgacaacacctacttcggctacagcaccccctgggggtattttgactttaacagattccactgccacttctcaccacgtgactggcagcgactcatcaacaacaactggggattccggcccaagagactcaacttcaagctcttcaacatccaggtcaaggaggtcacgacgaatgatggcaccacgaccatcgccaataaccttaccagcacggttcaggtctttacggactcggaataccagctcccgtacgtcctcggctctgcgcaccagggctgcctgcctccgttcccggcggacgtcttcatgattcctcagtacgggtacctgactctgaacaatggcagtcaggccgtgggccgttcctccttctactgcctggagtactttccttctcaaatgctgagaacgggcaacaactttgagttcagctacacgtttgaggacgtgccttttcacagcagctacgcgcacagccaaagcctggaccggctgatgaaccccctcatcgaccagtacctgtactacctgtctcggactcagaccacgggaggtaccgcaggaaatcggacgttgcaattttctcaggccgggcctagtagcatggcgaatcaggccaaaaactggctacccgggccctgctaccggcagcaacgcgtctccaagacaacgaatcaaaataacaacagcaactttgcctggaccggtgccaccaagtatcatctgaatggcagagactctctggtaaatcccggtgtcgctatggcaacccacaaggacgacgaagaccgattttttccgtccagcggagtcttaatatttgggaaacagggagctggaaatgacaacgtggaccttgacaacgttatgataaccagtgaggaagaaattaaaaccaccaacccagtggccacagaagagtacggcgtggtggccactaacctgcaatcggcaaacaccgctcctcaaacagggaccgtcaacagtcaaggagccttacctggcatggtctggcagaaccgggacgtgtacctgcagggtcctatctgggccaagattcctcacacggacggaaactttcatccctcgccgctgatgggaggctttggactgaaacacccgcctcctcagatcctgattaagaatacacctgttcccgcgaatcctccaactaccttcagtccagctaagtttgcgtcgttcatcacgcagtacagcaccggacaggtcagcgtggaaattgaatgggagctgcagaaagaaaacagcaaacgctggaacccagagattcaatacacttccaactacaacaaatctacaaatgtggactttgctgttgacacagaaggcgtttattctgagcctcgccccatcggcacccgttacctcacccgtaatctg

SEQ ID NO: 916 - protein, 738 aa, Artificial Sequence
  source: /note="Description of Artificial Sequence: Synthetic polypeptide"
  VARIANT (158)..(158): /replace="Ser"
  VARIANT (169)..(169): /replace="Arg"
  VARIANT (564)..(564): /replace="Asn
  SITE (1)..(738): /note="Variant residues given in the sequence have no preference with respect to those in the annotations for variant positions"
MAADGYLPDWLEDNLSEGIREWWDLKPGAPKPKANQQKQDDGRGLVLPGYKYLGPFNGLDKGEPVNAADAAALEHDKAYDQQLKAGDNPYLRYNHADAEFQERLQEDTSFGGNLGRAVFQAKKRVLEPLGLVEEGAKTAPGKKRPVEQSPQREPDSSTGIGKKGQQPAKKRLNFGQTGDSESVPDPQPLGEPPAAPSGVGSNTMAAGGGAPMADNNEGADGVGNSSGNWHCDSTWLGDRVITTSTRTWALPTYNNHLYKQISNGTSGGSTNDNTYFGYSTPWGYFDFNRFHCHFSPRDWQRLINNNWGFRPKRLNFKLFNIQVKEVTTNEGTKTIANNLTSTVQVFTDSEYQLPYVLGSAHQGCLPPFPADVFMIPQYGYLTLNNGSQAVGRSSFYCLEYFPSQMLRTGNNFQFSYTFEDVPFHSSYAHSQSLDRLMNPLIDQYLYYLSRTQTTGGTAGTQTLQFSQAGPSSMANQAKNWLPGPCYRQQRVSTTTNQNNNSNFAWTGATKYHLNGRDSLVNPGVAMATHKDDEDRFFPSSGVLIFGKQGAGNDNVDYSNVMITSEEEIKTTNPVATEEYGVVATNLQSANTAPQTGTVNSQGALPGMVWQNRDVYLQGPIWAKIPHTDGNFHPSPLMGGFGLKHPPPQILIKNTPVPADPPTTFNQAKLNSFITQYSTGQVSVEIEWELQKENSKRWNPEIQYTSNYYKSTNVDFAVNTEGVYSEPRPIGTRYLTRNL

SEQ ID NO: 917 - DNA, 2214 bp, Artificial Sequence
  source: /note="Description of Artificial Sequence: Synthetic polynucleotide"
  variation (472)..(474): /replace="agc"
  variation (505)..(507): /replace="aga"
  variation (1690)..(1692): /replace="aac"
  misc_feature (1)..(2214): /note="Variant residues given in the sequence have no preference with respect to those in the annotations for variant positions"
atggctgccgatggttatcttccagattggctcgaggacaacctctctgagggcattcgcgagtggtgggacctgaaacctggagccccgaaacccaaagccaaccagcaaaagcaggacgacggccggggtctggtgcttcctggctacaagtacctcggacccttcaacggactcgacaagggggagcccgtcaacgcggcggacgcagcggccctcgagcacgacaaggcctacgaccagcagctcaaagcgggtgacaatccgtacctgcggtataatcacgccgacgccgagtttcaggagcgtctgcaagaagatacgtcttttgggggcaacctcgggcgagcagtcttccaggccaagaagcgggttctcgaacctctcggtctggttgaggaaggcgctaagacggctcctggaaagaagagaccggtagagcagtcaccacagcgtgagcccgactcctccacgggcatcggcaagaaaggccagcagcccgccaaaaagagactcaatttcggtcagactggcgactcagagtcagtccccgaccctcaacctctcggagaacctccagcagcgccctctggtgtgggatctaatacaatggctgcaggcggtggcgcaccaatggcagacaataacgaaggtgccgacggagtgggtaattcctcgggaaattggcattgcgattccacatggctgggcgacagagtcatcaccaccagcacccgaacctgggccctgcccacctacaacaaccacctctacaagcaaatctccaacgggacctcgggaggcagcaccaacgacaacacctactttggctacagcaccccctgggggtattttgactttaacagattccactgccacttctcaccacgtgactggcagcgactcatcaacaacaactggggattccggcccaagagactcaacttcaagctcttcaacatccaggtcaaagaggtcacgacgaatgaaggcaccaagaccatcgccaataacctcaccagcaccgtccaggtgtttacggactcggaataccagctgccgtacgtcctcggctctgcccaccagggctgcctgcctccgttcccggcggacgtcttcatgattcctcagtacggctacctgactctcaacaacggtagtcaggccgtgggacgttcctccttctactgcctggagtacttcccctctcagatgctgagaacgggcaacaactttcaattcagctacactttcgaggacgtgcctttccacagcagctacgcgcacagccagagtttggacaggctgatgaatcctctcatcgaccagtacctgtactacctgtcaagaacccagactacgggaggcacagcgggaacccagacgttgcagttttctcaggccgggcctagcagcatggcgaatcaggccaaaaactggctgcctggaccctgctacagacagcagcgcgtctccacgacaacgaatcaaaacaacaacagcaactttgcctggactggtgccaccaagtatcatctgaacggcagagactctctggtgaatccgggcgtcgccatggcaacccacaaggacgacgaggaccgcttcttcccatccagcggcgtcctcatatttggcaagcagggagctggaaatgacaacgtggactatagcaacgtgatgataaccagcgaggaagaaatcaagaccaccaaccccgtggccacagaagagtatggcgtggtggctactaacctacagtcggcaaacaccgctcctcaaacggggaccgtcaacagccagggagccttacctggcatggtctggcagaaccgggacgtgtacctgcagggtcctatttgggccaagattcctcacacagatggcaactttcacccgtctcctttaatgggcggctttggacttaaacatccgcctcctcagatcctcatcaaaaacactcctgttcctgcggatcctccaacaacgttcaaccaggccaagctgaattctttcatcacgcagtacagcaccggacaagtcagcgtggagatcgagtgggagctgcagaaggagaacagcaagcgctggaacccagagattcagtatacttccaactactacaaatctacaaatgtggactttgctgttaatactgagggtgtttactctgagcctcgccccattggcactcgttacctcacccgtaatctg

SEQ ID NO: 918 - protein, 738 aa, Artificial Sequence
  source: /note="Description of Artificial Sequence: Synthetic polypeptide"
  VARIANT (158)..(158): /replace="Ser"
  VARIANT (169)..(169): /replace="Lys"
  VARIANT (315)..(315): /replace="Ser"
  VARIANT (413)..(413): /replace="Glu"
  VARIANT (472)..(472): /replace="Thr" or "Ser"
  VARIANT (534)..(534): /replace="Glu"
  VARIANT (542)..(542): /replace="Val"
  VARIANT (595)..(595): /replace="Val
  SITE (1)..(738): /note="Variant residues given in the sequence have no preference with respect to those in the annotations for variant positions"
MAADGYLPDWLEDNLSEGIREWWDLKPGAPKPKANQQKQDDGRGLVLPGYKYLGPFNGLDKGEPVNAADAAALEHDKAYDQQLKAGDNPYLRYNHADAEFQERLQEDTSFGGNLGRAVFQAKKRVLEPLGLVEEGAKTAPGKKRPVEQSPQREPDSSTGIGKKGQQPARKRLNFGQTGDSESVPDPQPLGEPPAAPSGVGSNTMAAGGGAPMADNNEGADGVGSSSGNWHCDSTWLGDRVITTSTRTWALPTYNNHLYKQISNGTSGGSTNDNTYFGYSTPWGYFDFNRFHCHFSPRDWQRLINNNWGFRPKRLNFKLFNIQVKEVTQNEGTKTIANNLTSTIQVFTDSEYQLPYVLGSAHQGCLPPFPADVFMIPQYGYLTLNNGSQAVGRSSFYCLEYFPSQMLRTGNNFQFSYTFEDVPFHSSYAHSQSLDRLMNPLIDQYLYYLSRTQTTGGTAGTQTLQFSQAGPSNMANQAKNWLPGPCYRQQRVSTTTSQNNNSNFAWTGATKYHLNGRDSLVNPGVAMATHKDDEDRFFPSSGILIFGKQGAGKDNVDYSNVMLTSEEEIKTTNPVATEEYGVVADNLQQQNTAPQIGTVNSQGALPGMVWQNRDVYLQGPIWAKIPHTDGNFHPSPLMGGFGLKHPPPQILIKNTPVPADPPTTFNQAKLNSFITQYSTGQVSVEIEWELQKENSKRWNPEIQYTSNYYKSTNVDFAVNTEGVYSEPRPIGTRYLTRNL

SEQ ID NO: 919 - DNA, 2214 bp, Artificial Sequence
  source: /note="Description of Artificial Sequence: Synthetic polynucleotide"
  variation (472)..(474): /replace="agc"
  variation (505)..(507): /replace="aag"
  variation (943)..(945): /replace="agc"
  variation (1237)..(1239): /replace="gaa"
  variation (1414)..(1416): /replace="aac" or "agc"
  variation (1600)..(1602): /replace="gag"
  variation (1624)..(1626): /replace="gtc"
  variation (1783)..(1785): /replace="gta"
  misc_feature (1)..(2214): /note="Variant residues given in the sequence have no preference with respect to those in the annotations for variant positions"
atggctgccgatggttatcttccagattggctcgaggacaacctctctgagggcattcgcgagtggtgggacctgaaacctggagccccgaaacccaaagccaaccagcaaaagcaggacgacggccggggtctggtgcttcctggctacaagtacctcggacccttcaacggactcgacaagggggagcccgtcaacgcggcggacgcagcggccctcgagcacgacaaggcctacgaccagcagctcaaagcgggtgacaatccgtacctgcggtataatcacgccgacgccgagtttcaggagcgtctgcaagaagatacgtcttttgggggcaacctcgggcgagcagtcttccaggccaagaagcgggttctcgaacctctcggtctggttgaggaaggcgctaagacggctcctggaaagaagagaccggtagagcagtcaccacagcgtgagcccgactcctccacgggcatcggcaagaaaggccagcagcccgccagaaagagactcaatttcggtcagactggcgactcagagtcagtccccgaccctcaacctctcggagaacctccagcagcgccctctggtgtgggatctaatacaatggctgcaggcggtggcgcaccaatggcagacaataacgaaggtgccgacggagtgggtagttcctcgggaaattggcattgcgattccacatggctgggcgacagagtcatcaccaccagcacccgaacctgggccctgcccacctacaacaaccacctctacaagcaaatctccaacgggacctcgggaggcagcaccaacgacaacacctactttggctacagcaccccctgggggtattttgactttaacagattccactgccacttctcaccacgtgactggcagcgactcatcaacaacaactggggattccggcccaagagactcaacttcaagctcttcaacatccaggtcaaagaggtcacgcagaatgaaggcaccaagaccatcgccaataacctcaccagcaccatccaggtgtttacggactcggaataccagctgccgtacgtcctcggctctgcccaccagggctgcctgcctccgttcccggcggacgtcttcatgattcctcagtacggctacctgactctcaacaacggtagtcaggccgtgggacgttcctccttctactgcctggagtacttcccctctcagatgctgagaacgggcaacaactttcaattcagctacactttcgaggacgtgcctttccacagcagctacgcgcacagccagagtttggacaggctgatgaatcctctcatcgaccagtacctgtactacctgtcaagaacccagactacgggaggcacagcgggaacccagacgttgcagttttctcaggccgggcctagcaccatggcgaatcaggccaaaaactggctgcctggaccctgctacagacagcagcgcgtctccacgacaacgtcgcaaaacaacaacagcaactttgcctggactggtgccaccaagtatcatctgaacggcagagactctctggtgaatccgggcgtcgccatggcaacccacaaggacgacgaggaccgcttcttcccatccagcggcatcctcatatttggcaagcagggagctggaaaagacaacgtggactatagcaacgtgatgctaaccagcgaggaagaaatcaagaccaccaaccccgtggccacagaagagtatggcgtggtggctgataacctacagcagcaaaacaccgctcctcaaatagggaccgtcaacagccagggagccttacctggcatggtctggcagaaccgggacgtgtacctgcagggtcctatttgggccaagattcctcacacagatggcaactttcacccgtctcctttaatgggcggctttggacttaaacatccgcctcctcagatcctcatcaaaaacactcctgttcctgcggatcctccaacaacgttcaaccaggccaagctgaattctttcatcacgcagtacagcaccggacaagtcagcgtggagatcgagtgggagctgcagaaggagaacagcaagcgctggaacccagagattcagtatacttccaactactacaaatctacaaatgtggactttgctgttaatactgagggtgtttactctgagcctcgccccattggcactcgttacctcacccgtaatctg

SEQ ID NO: 920 - protein, 738 aa, Artificial Sequence
  source: /note="Description of Artificial Sequence: Synthetic polypeptide"
  VARIANT (169)..(169): /replace="Lys"
  VARIANT (315)..(315): /replace="Ser"
  VARIANT (534)..(534): /replace="Glu"
  VARIANT (542)..(542): /replace="Val
  SITE (1)..(738): /note="Variant residues given in the sequence have no preference with respect to those in the annotations for variant positions"
MAADGYLPDWLEDNLSEGIREWWDLKPGAPKPKANQQKQDDGRGLVLPGYKYLGPFNGLDKGEPVNAADAAALEHDKAYDQQLKAGDNPYLRYNHADAEFQERLQEDTSFGGNLGRAVFQAKKRVLEPLGLVEEGAKTAPGKKRPVEPSPQRSPDSSTGIGKKGQQPARKRLNFGQTGDSESVPDPQPIGEPPAAPSGVGSGTMAAGGGAPMADNNEGADGVGSSSGNWHCDSTWLGDRVITTSTRTWALPTYNNHLYKQISNGTSGGSTNDNTYFGYSTPWGYFDFNRFHCHFSPRDWQRLINNNWGFRPKRLNFKLFNIQVKEVTQNEGTKTIANNLTSTIQVFTDSEYQLPYVLGSAHQGCLPPFPADVFMIPQYGYLTLNNGSQAVGRSSFYCLEYFPSQMLRTGNNFEFSYTFEDVPFHSSYAHSQSLDRLMNPLIDQYLYYLSRTQSTGGTAGTQQLLFSQAGPSNMSAQAKNWLPGPCYRQQRVSTTLSQNNNSNFAWTGATKYHLNGRDSLVNPGVAMATHKDDEDRFFPSSGILMFGKQGAGKDNVDYSNVMLTSEEEIKTTNPVATEQYGVVADNLQQQNTAPIVGAVNSQGALPGMVWQNRDVYLQGPIWAKIPHTDGNFHPSPLMGGFGLKHPPPQILIKNTPVPADPPTTFNQAKLNSFITQYSTGQVSVEIEWELQKENSKRWNPEIQYTSNYYKSTNVDFAVNTEGVYSEPRPIGTRYLTRNL

SEQ ID NO: 921 - DNA, 2214 bp, Artificial Sequence
  source: /note="Description of Artificial Sequence: Synthetic polynucleotide"
  variation (505)..(507): /replace="aaa"
  variation (943)..(945): /replace="agc"
  variation (1600)..(1602): /replace="gag"
  variation (1624)..(1626): /replace="gtc"
  misc_feature (1)..(2214): /note="Variant residues given in the sequence have no preference with respect to those in the annotations for variant positions"
atggctgccgatggttatcttccagattggctcgaggacaacctctctgagggcattcgcgagtggtgggacctgaaacctggagccccgaaacccaaagccaaccagcaaaagcaggacgacggccggggtctggtgcttcctggctacaagtacctcggacccttcaacggactcgacaagggggagcccgtcaacgcggcggacgcagcggccctcgagcacgacaaggcctacgaccagcagctcaaagcgggtgacaatccgtacctgcggtataatcacgccgacgccgagtttcaggagcgtctgcaagaagatacgtcttttgggggcaacctcgggcgagcagtcttccaggccaagaagcgggttctcgaacctctcggtctggttgaggaaggcgctaagacggctcctggaaagaagagaccggtagagccgtcaccacagcgttcccccgactcctccacgggcatcggcaagaaaggccagcagcccgccagaaagagactcaatttcggtcagactggcgactcagagtcagtccccgaccctcaacctatcggagaacctccagcagcgccctctggtgtgggatctggtacaatggctgcaggcggtggcgcaccaatggcagacaataacgaaggtgccgacggagtgggtagttcctcgggaaattggcattgcgattccacatggctgggcgacagagtcatcaccaccagcacccgaacctgggccctgcccacctacaacaaccacctctacaagcaaatctccaacgggacctcgggaggcagcaccaacgacaacacctactttggctacagcaccccctgggggtattttgactttaacagattccactgccacttctcaccacgtgactggcagcgactcatcaacaacaactggggattccggcccaagagactcaacttcaagctcttcaacatccaggtcaaagaggtcacgcagaatgaaggcaccaagaccatcgccaataacctcaccagcaccatccaggtgtttacggactcggaataccagctgccgtacgtcctcggctctgcccaccagggctgcctgcctccgttcccggcggacgtcttcatgattcctcagtacggctacctgactctcaacaacggtagtcaggccgtgggacgttcctccttctactgcctggagtacttcccctctcagatgctgagaacgggcaacaactttgagttcagctacactttcgaggacgtgcctttccacagcagctacgcgcacagccagagtttggacaggctgatgaatcctctcatcgaccagtacctgtactacctgtcaagaacccagtctacgggaggcacagcgggaacccagcagttgctgttttctcaggccgggcctagcaacatgtcggctcaggccaaaaactggctgcctggaccctgctacagacagcagcgcgtctccacgacactgtcgcaaaacaacaacagcaactttgcctggactggtgccaccaagtatcatctgaacggcagagactctctggtgaatccgggcgtcgccatggcaacccacaaggacgacgaggaccgcttcttcccatccagcggcatcctcatgtttggcaagcagggagctggaaaagacaacgtggactatagcaacgtgatgctaaccagcgaggaagaaatcaagaccaccaaccccgtggccacagaacagtatggcgtggtggctgataacctacagcagcaaaacaccgctcctattgtgggggccgtcaacagccagggagccttacctggcatggtctggcagaaccgggacgtgtacctgcagggtcctatttgggccaagattcctcacacagatggcaactttcacccgtctcctttaatgggcggctttggacttaaacatccgcctcctcagatcctcatcaaaaacactcctgttcctgcggatcctccaacaacgttcaaccaggccaagctgaattctttcatcacgcagtacagcaccggacaagtcagcgtggagatcgagtgggagctgcagaaggagaacagcaagcgctggaacccagagattcagtatacttccaactactacaaatctacaaatgtggactttgctgttaatactgagggtgtttactctgagcctcgccccattggcactcgttacctcacccgtaatctg

SEQ ID NO: 922 - protein, 738 aa, Artificial Sequence
  source: /note="Description of Artificial Sequence: Synthetic polypeptide"
  VARIANT (471)..(471): /replace="Asn
  SITE (1)..(738): /note="Variant residues given in the sequence have no preference with respect to those in the annotations for variant positions"
MAADGYLPDWLEDNLSEGIREWWDLKPGAPKPKANQQKQDDGRGLVLPGYKYLGPFNGLDKGEPVNAADAAALEHDKAYDQQLKAGDNPYLRYNHADAEFQERLQEDTSFGGNLGRAVFQAKKRVLEPLGLVEEGAKTAPGKKRPVEPSPQRSPDSSTGIGKKGQQPAKKRLNFGQTGDSESVPDPQPIGEPPAGPSGLGSGTMAAGGGAPMADNNEGADGVGSSSGNWHCDSTWLGDRVITTSTRTWALPTYNNHLYKQISNGTSGGSTNDNTYFGYSTPWGYFDFNRFHCHFSPRDWQRLINNNWGFRPKRLNFKLFNIQVKEVTQNEGTKTIANNLTSTIQVFTDSEYQLPYVLGSAHQGCLPPFPADVFMIPQYGYLTLNNGSQAVGRSSFYCLEYFPSQMLRTGNNFEFSYTFEDVPFHSSYAHSQSLDRLMNPLIDQYLYYLSRTQSTGGTAGTQQLLFSQAGPSNMSAQAKNWLPGPCYRQQRVSTTLSQNNNSNFAWTGATKYHLNGRDSLVNPGVAMATHKDDEERFFPSSGVLMFGKQGAGKDNVDYSSVMLTSEEEIKTTNPVATEQYGVVADNLQQQNTAPIVGAVNSQGALPGMVWQNRDVYLQGPIWAKIPHTDGNFHPSPLMGGFGLKHPPPQILIKNTPVPADPPTTFSQAKLASFITQYSTGQVSVEIEWELQKENSKRWNPEIQYTSNYYKSTNVDFAVNTEGTYSEPRPIGTRYLTRNL

SEQ ID NO: 923 - DNA, 2214 bp, Artificial Sequence
  source: /note="Description of Artificial Sequence: Synthetic polynucleotide"
  variation (1411)..(1413): /replace="aat"
  misc_feature (1)..(2214): /note="Variant residues given in the sequence have no preference with respect to those in the annotations for variant positions"
atggctgccgatggttatcttccagattggctcgaggacaacctctctgagggcattcgcgagtggtgggacttgaaacctggagccccgaaacccaaagccaaccagcaaaagcaggacgacggccggggtctggtgcttcctggctacaagtacctcggacccttcaacggactcgacaagggggagcccgtcaacgcggcggacgcagcggccctcgagcacgacaaggcctacgaccagcagctcaaagcgggtgacaatccgtacctgcggtataaccacgccgacgccgagtttcaggagcgtctgcaagaagatacgtcttttgggggcaacctcgggcgagcagtcttccaggccaagaagcgggttctcgaacctctcggtctggttgaggaaggcgctaagacggctcctggaaagaagagaccggtagagccatcaccccagcgttctccagactcctctacgggcatcggcaagaaaggccagcagcccgcgaaaaagagactcaactttgggcagactggcgactcagagtcagtgcccgaccctcaaccaatcggagaaccccccgcaggcccctctggtctgggatctggtacaatggctgcaggcggtggcgctccaatggcagacaataacgaaggcgccgacggagtgggtagttcctcaggaaattggcattgcgattccacatggctgggcgacagagtcatcaccaccagcacccgaacctgggccctccccacctacaacaaccacctctacaagcaaatctccaacgggacttcgggaggaagcaccaacgacaacacctacttcggctacagcaccccctgggggtattttgactttaacagattccactgccacttctcaccacgtgactggcagcgactcatcaacaacaactggggattccggcccaagagactcaacttcaagctcttcaacatccaggtcaaggaggtcacgcagaatgaaggcaccaagaccatcgccaataaccttaccagcacgattcaggtctttacggactcggaataccagctcccgtacgtcctcggctctgcgcaccagggctgcctgcctccgttcccggcggacgtcttcatgattcctcagtacgggtacctgactctgaacaatggcagtcaggccgtgggccgttcctccttctactgcctggagtactttccttctcaaatgctgagaacgggcaacaactttgagttcagctacacgtttgaggacgtgccttttcacagcagctacgcgcacagccaaagcctggaccggctgatgaaccccctcatcgaccagtacctgtactacctgtctcggactcagtccacgggaggtaccgcaggaactcagcagttgctattttctcaggccgggcctagtaacatgtcggctcaggccaaaaactggctacccgggccctgctaccggcagcaacgcgtctccacgacactgtcgcaaaataacaacagcaactttgcctggaccggtgccaccaagtatcatctgaatggcagagactctctggtaaatcccggtgtcgctatggcaacccacaaggacgacgaagagcgattttttccgtccagcggagtcttaatgtttgggaaacagggagctggaaaagacaacgtggactatagcagcgttatgctaaccagtgaggaagaaattaaaaccaccaacccagtggccacagaacagtacggcgtggtggccgataacctgcaacagcaaaacaccgctcctattgtaggggccgtcaacagtcaaggagccttacctggcatggtctggcagaaccgggacgtgtacctgcagggtcctatctgggccaagattcctcacacggacggaaactttcatccctcgccgctgatgggaggctttggactgaaacacccgcctcctcagatcctgattaagaatacacctgttcccgcggatcctccaactaccttcagtcaagctaagctggcgtcgttcatcacgcagtacagcaccggacaggtcagcgtggaaattgaatgggagctgcagaaagaaaacagcaaacgctggaacccagagattcaatacacttccaactactacaaatctacaaatgtggactttgctgttaacacagaaggcacttattctgagcctcgccccatcggcacccgttacctcacccgtaatctg

SEQ ID NO: 924 - protein, 737 aa, Artificial Sequence
  source: /note="Description of Artificial Sequence: Synthetic polypeptide"
  VARIANT (148)..(148): /replace="Gln"
  VARIANT (169)..(169): /replace="Arg"
  VARIANT (314)..(314): /replace="Asn"
  VARIANT (466)..(466): /replace="His"
  VARIANT (563)..(563): /replace="Ser"
  VARIANT (580)..(580): /replace="Ile"
  VARIANT (588)..(588): /replace="Ser
  SITE (1)..(737): /note="Variant residues given in the sequence have no preference with respect to those in the annotations for variant positions"
MAADGYLPDWLEDNLSEGIREWWDLKPGAPKPKANQQKQDDGRGLVLPGYKYLGPFNGLDKGEPVNAADAAALEHDKAYDQQLKAGDNPYLRYNHADAEFQERLQEDTSFGGNLGRAVFQAKKRVLEPLGLVEEGAKTAPGKKRPVEPSPQRSPDSSTGIGKKGQQPAKKRLNFGQTGDSESVPDPQPLGEPPAAPSGVGSGTMAAGGGAPMADNNEGADGVGNASGNWHCDSTWLGDRVITTSTRTWALPTYNNHLYKQISSQSAGSTNDNTYFGYSTPWGYFDFNRFHCHFSPRDWQRLINNNWGFRPKKLRFKLFNIQVKEVTTNDGVTTIANNLTSTVQVFSDSEYQLPYVLGSAHQGCLPPFPADVFMIPQYGYLTLNNGSQSVGRSSFYCLEYFPSQMLRTGNNFEFSYTFEDVPFHSSYAHSQSLDRLMNPLIDQYLYYLARTQSTTGGTAGNRELQFYQAGPSTMAEQAKNWLPGPCYRQQRVSKTLDQNNNSNFAWTGATKYHLNGRNSLVNPGVAMATHKDDEDRFFPSSGVLIFGKTGAANKTTLENVLMTNEEEIKTTNPVATEEYGVVSSNLQSANTAPQTQTVNSQGALPGMVWQNRDVYLQGPIWAKIPHTDGNFHPSPLMGGFGLKHPPPQILIKNTPVPANPPEVFTPAKFASFITQYSTGQVSVEIEWELQKENSKRWNPEIQYTSNYDKSTNVDFAVDSEGVYSEPRPIGTRYLTRNL

SEQ ID NO: 925 - DNA, 2211 bp, Artificial Sequence
  source: /note="Description of Artificial Sequence: Synthetic polynucleotide"
  variation (442)..(444): /replace="cag"
  variation (505)..(507): /replace="aga"
  variation (940)..(942): /replace="aac"
  variation (1396)..(1398): /replace="cac"
  variation (1687)..(1689): /replace="agt"
  variation (1738)..(1740): /replace="ata"
  variation (1762)..(1764): /replace="tct"
  misc_feature (1)..(2211): /note="Variant residues given in the sequence have no preference with respect to those in the annotations for variant positions"
atggctgccgatggttatcttccagattggctcgaggacaacctctctgagggcattcgcgagtggtgggacctgaaacctggagccccgaaacccaaagccaaccagcaaaagcaggacgacggccggggtctggtgcttcctggctacaagtacctcggacccttcaacggactcgacaagggggagcccgtcaacgcggcggacgcagcggccctcgagcacgacaaggcctacgaccagcagctcaaagcgggtgacaatccgtacctgcggtataaccacgccgacgccgagtttcaggagcgtctgcaagaagatacgtcatttgggggcaacctcgggcgagcagtcttccaggccaagaagcgggttctcgaacctctcggtctggttgaggaaggcgctaagacggctcctggaaagaagagaccggtagagccgtcacctcagcgttcccccgactcctccacgggcatcggcaagaaaggccagcagcccgccaaaaagagactcaatttcggtcagactggcgactcagagtcagtccccgaccctcaacctctcggagaacctccagcagcgccctctggtgtgggatctggtacaatggctgcaggcggtggcgcaccaatggcagacaataacgaaggtgccgacggagtgggtaatgcctcaggaaattggcattgcgattccacatggctgggcgacagagtcattaccaccagcacccgaacctgggccctgcccacctacaacaaccacctctacaagcaaatctccagtcaaagtgcaggtagtaccaacgacaacacctacttcggctacagcaccccctgggggtattttgactttaacagattccactgccacttctcaccacgtgactggcagcgactcatcaacaacaactggggattccggcccaagaagctgcggttcaagctcttcaacatccaggtcaaggaggtcacgacgaatgacggcgttacgaccatcgctaataaccttaccagcacggttcaggtattctcggactcggaataccagctgccgtacgtcctcggctctgcgcaccagggctgcctgcctccgttcccggcggacgtcttcatgattcctcagtacggctacctgactctcaacaatggcagtcagtctgtgggacgttcctccttctactgcctggagtacttcccctctcagatgctgagaacgggcaacaactttgagttcagctacaccttcgaggacgtgcctttccacagcagctacgcacacagccagagcctggaccggctgatgaatcccctcatcgaccagtacttgtactacctggccagaacacagagtaccacaggaggcacagctggcaatcgggaactgcagttttaccaggccgggccttcaactatggccgaacaagccaagaattggttacctggaccttgctaccggcaacaaagagtctccaaaacgctggatcaaaacaacaacagcaactttgcttggactggtgccaccaaatatcacctgaacggcagaaactcgttggttaatcccggcgtcgccatggcaactcacaaggacgacgaggaccgctttttcccatccagcggagtcctgatttttggaaaaactggagcagctaacaaaactacattggaaaatgtgttaatgacaaatgaagaagaaattaaaactactaatcctgtagccacggaagaatacggggtagtcagcagcaacttacaatcggctaatactgcaccccagacacaaactgtcaacagccagggagccttacctggcatggtctggcagaaccgggacgtgtacctgcagggtcccatctgggccaagattcctcacacggatggcaactttcacccgtctcctttgatgggcggctttggacttaaacatccgcctcctcagatcctgatcaagaacactcccgttcccgctaatcctccggaggtgtttactcctgccaagtttgcttcgttcatcacacagtacagcaccggacaagtcagcgtggaaatcgagtgggagctgcagaaggaaaacagcaagcgctggaacccggagattcagtacacctccaactatgataagtcgactaatgtggactttgccgttgacagcgagggtgtttactctgagcctcgccctattggcactcgttacctcacccgtaatctg

SEQ ID NO: 926 - protein, 735 aa, Artificial Sequence
  source: /note="Description of Artificial Sequence: Synthetic polypeptide"
  VARIANT (162)..(162): /replace="Thr"
  VARIANT (168)..(168): /replace="Arg"
  VARIANT (224)..(224): /replace="Ser"
  VARIANT (310)..(310): /replace="Lys"
  VARIANT (410)..(410): /replace="Gln"
  VARIANT (446)..(446): /replace="Asn"
  VARIANT (461)..(461): /replace="Leu"
  VARIANT (471)..(471): /replace="Ser"
  VARIANT (708)..(708): /replace="Thr
  SITE (1)..(735): /note="Variant residues given in the sequence have no preference with respect to those in the annotations for variant positions"
MAADGYLPDWLEDNLSEGIREWWDLKPGAPKPKANQQKQDDGRGLVLPGYKYLGPFNGLDKGEPVNAADAAALEHDKAYDQQLKAGDNPYLRYNHADAEFQERLQEDTSFGGNLGRAVFQAKKRVLEPLGLVEEGAKTAPGKKRPVEQSPQEPDSSSGIGKSGQQPAKKRLNFGQTGDSESVPDPQPLGEPPAAPSGVGSNTMASGGGAPMADNNEGADGVGNASGNWHCDSTWLGDRVITTSTRTWALPTYNNHLYKQISSQSGASNDNHYFGYSTPWGYFDFNRFHCHFSPRDWQRLINNNWGFRPKRLNFKLFNIQVKEVTTNDGTTTIANNLTSTVQVFTDSEYQLPYVLGSAHQGCLPPFPADVFMIPQYGYLTLNNGSQAVGRSSFYCLEYFPSQMLRTGNNFTFSYTFEDVPFHSSYAHSQSLDRLMNPLIDQYLYYLSRTQTTSGTAQNRELQFSQAGPSSMANQAKNWLPGPCYRQQRVSKTANDNNNSNFAWTGATKYHLNGRDSLVNPGPAMASHKDDEDKFFPMSGVLIFGKQGAGASNVDLDNVMITDEEEIKTTNPVATEQYGTVATNLQSSNTAPATGTVNSQGALPGMVWQDRDVYLQGPIWAKIPHTDGHFHPSPLMGGFGLKHPPPQILIKNTPVPANPPTTFSPAKFASFITQYSTGQVSVEIEWELQKENSKRWNPEIQYTSNYNKSANVDFTVDTNGVYSEPRPIGTRYLTRNL

SEQ ID NO: 927 - DNA, 2205 bp, Artificial Sequence
  source: /note="Description of Artificial Sequence: Synthetic polynucleotide"
  variation (484)..(486): /replace="aca"
  variation (502)..(504): /replace="aga"
  variation (670)..(672): /replace="tcc"
  variation (928)..(930): /replace="aaa"
  variation (1228)..(1230): /replace="cag"
  variation (1336)..(1338): /replace="aac"
  variation (1381)..(1383): /replace="ctg"
  variation (1411)..(1413): /replace="tct"
  variation (2122)..(2124): /replace="acc"
  misc_feature (1)..(2205): /note="Variant residues given in the sequence have no preference with respect to those in the annotations for variant positions"
atggctgccgatggttatcttccagattggctcgaggacaacctctctgagggcattcgcgagtggtgggacttgaaacctggagccccgaaacccaaagccaaccagcaaaagcaggacgacggccggggtctggtgcttcctggctacaagtacctcggacccttcaacggactcgacaagggggagcccgtcaacgcggcggatgcagcggccctcgagcacgacaaggcctacgaccagcagctcaaagcgggtgacaatccgtacctgcggtataaccacgccgacgccgagtttcaggagcgtctgcaagaagatacgtcttttgggggcaacctcgggcgagcagtcttccaggccaagaagagggttctcgaacctcttggtctggttgaggaaggtgctaagacggctcctggaaagaaacgtccggtagagcagtcgccacaagagccagactcctcctcgggcattggcaagtcaggccagcagcccgctaaaaagagactcaattttggtcagactggcgactcagagtcagtccccgacccacaacctctcggagaacctccagcagccccctctggtgtgggatctaatacaatggcttcaggcggtggcgcaccaatggcagacaataacgaaggcgccgacggagtgggtaatgcctcaggaaattggcattgcgattccacatggctgggcgacagagtcatcaccaccagcacccgaacatgggccttgcccacctataacaaccacctctacaagcaaatctccagtcaatcaggggccagcaacgacaaccactacttcggctacagcaccccctgggggtattttgatttcaacagattccactgccatttctcaccacgtgactggcagcgactcatcaacaacaattggggattccggcccaagagactcaacttcaagctcttcaacatccaagtcaaggaggtcacgacgaatgatggcaccacgaccatcgctaataaccttaccagcacggttcaagtcttcacggactcggagtaccagttgccgtacgtcctcggctctgcgcaccagggctgcctccctccgttcccggcggacgtgttcatgattccgcagtacggctacctaacgctcaacaatggcagccaggcagtgggacggtcatccttttactgcctggaatatttcccatcgcagatgctgagaacgggcaataactttaccttcagctacaccttcgaggacgtgcctttccacagcagctacgcgcacagccagagcctggaccggctgatgaatcctctcatcgaccagtacctgtattacctgagcagaactcagactacgtccggaactgcccaaaacagggagttgcagtttagccaggcgggtccatctagcatggctaatcaggccaaaaactggctacctggaccctgttaccggcagcagcgcgtttctaaaacagcaaatgacaacaacaacagcaactttgcctggactggtgctacaaaatatcaccttaatgggcgtgattctttagtcaaccctggccctgctatggcctcacacaaagacgacgaagacaagttctttcccatgagcggtgtcttgatttttggaaagcagggcgccggagcttcaaacgttgatttggacaatgtcatgatcacagacgaagaggaaatcaaaaccactaaccccgtggccaccgaacaatatgggactgtggcaaccaatctccagagcagcaacacagcccctgcgaccggaactgtgaattctcagggagccttacctggaatggtgtggcaagacagagacgtatacctgcagggtcctatttgggccaaaattcctcacacggatggacactttcacccgtctcctctcatgggcggctttggacttaagcacccgcctcctcagatcctcatcaaaaacacgcctgttcctgcgaatcctccgacaacgttttcgcctgcaaagtttgcttcattcatcacccagtattccacaggacaagtgagcgtggagattgaatgggagctgcagaaagaaaacagcaaacgctggaatcccgaaatacagtatacatctaactataataaatctgccaacgttgatttcactgtggacaccaatggagtttatagtgagcctcgccccattggcacccgttacctcacccgtaacctg

SEQ ID NO: 928 - protein, 735 aa, Artificial Sequence
  source: /note="Description of Artificial Sequence: Synthetic polypeptide"
  VARIANT (42)..(42): /replace="Ser"
  VARIANT (168)..(168): /replace="Lys"
  VARIANT (310)..(310): /replace="Arg"
  VARIANT (410)..(410): /replace="Gln"
  VARIANT (446)..(446): /replace="Arg"
  VARIANT (461)..(461): /replace="Leu"
  VARIANT (471)..(471): /replace="Ser"
  VARIANT (475)..(475): /replace="Arg"
  VARIANT (504)..(504): /replace="Ala"
  VARIANT (539)..(539): /replace="Asn
  SITE (1)..(735): /note="Variant residues given in the sequence have no preference with respect to those in the annotations for variant positions"
MAADGYLPDWLEDNLSEGIREWWDLKPGAPQPKANQQHQDDGRGLVLPGYKYLGPFNGLDKGEPVNEADAAALEHDKAYDQQLKAGDNPYLKYNHADAEFQERLQEDTSFGGNLGRAVFQAKKRVLEPLGLVEEAAKTAPGKKRPVEQSPQEPDSSSGIGKSGQQPARKRLNFGQTGDSESVPDPQPLGEPPAAPSGVGSNTMASGGGAPMADNNEGADGVGNSSGNWHCDSTWLGDRVITTSTRTWALPTYNNHLYKQISSQSGASNDNHYFGYSTPWGYFDFNRFHCHFSPRDWQRLINNNWGFRPKKLNFKLFNIQVKEVTQNDGTTTIANNLTSTVQVFTDSEYQLPYVLGSAHQGCLPPFPADVFMIPQYGYLTLNNGSQAVGRSSFYCLEYFPSQMLRTGNNFTFSYTFEDVPFHSSYAHSQSLDRLMNPLIDQYLYYLSRTQTTSGTTQQSRLQFSQAGPSSMAQQAKNWLPGPCYRQQRVSKTANDNNNSNFAWTGATKYHLNGRDSLVNPGPAMASHKDDEEKFFPMHGVLIFGKQGTGASNVDLDNVMITDEEEIRTTNPVATEQYGTVATNLQSSNTAPATGTVNSQGALPGMVWQDRDVYLQGPIWAKIPHTDGHFHPSPLMGGFGLKHPPPQILIKNTPVPANPPTTFSPAKFASFITQYSTGQVSVEIEWELQKENSKRWNPEIQYTSNYNKSVNVDFTVDTNGVYSEPRPIGTRYLTRNL

SEQ ID NO: 929 - DNA, 2205 bp, Artificial Sequence
  source: /note="Description of Artificial Sequence: Synthetic polynucleotide"
  variation (124)..(126): /replace="agt"
  variation (502)..(504): /replace="aaa"
  variation (928)..(930): /replace="aga"
  variation (1228)..(1230): /replace="cag"
  variation (1336)..(1338): /replace="aga"
  variation (1381)..(1383): /replace="ctc"
  variation (1411)..(1413): /replace="tct"
  variation (1423)..(1425): /replace="aga"
  variation (1510)..(1512): /replace="gcg"
  variation (1615)..(1617): /replace="aac"
  misc_feature (1)..(2205): /note="Variant residues given in the sequence have no preference with respect to those in the annotations for variant positions"
atggctgctgacggttatcttccagattggctcgaggacaacctttctgaaggcattcgtgagtggtgggatctgaaacctggagcccctcaacccaaagcgaaccaacaacaccaggacgacggtcggggtcttgtgcttccgggttacaaatacctcggaccctttaacggactcgacaaaggagagccggtcaacgaggcggacgcggcagccctcgaacacgacaaagcttacgaccagcagctcaaggccggtgacaacccgtacctcaagtacaaccacgccgacgccgagtttcaggagcgtcttcaagaagatacgtcttttgggggcaaccttggcagagcagtcttccaggccaaaaagagggtccttgagcctcttggtctggttgaggaagcagctaaaacggctcctggaaagaagaggcctgtagaacagtctcctcaggaaccggactcatcatctggtattggcaaatcgggccaacagcctgccagaaaaagactaaatttcggtcagactggagactcagagtcagtcccagaccctcaacctctcggagaaccaccagcagccccctcaggtgtgggatctaatacaatggcttcaggcggtggcgcaccaatggcagacaataacgagggtgccgatggagtgggtaattcctcaggaaattggcattgcgattccacatggctgggcgacagagtcatcaccaccagcaccagaacctgggccctgcccacttacaacaaccatctctacaagcaaatctccagccaatcaggagcttcaaacgacaaccactactttggctacagcaccccttgggggtattttgactttaacagattccactgccacttctcaccacgtgactggcagcgactcattaacaacaactggggattccggcccaagaaactcaacttcaagctcttcaacatccaagttaaagaggtcacgcagaacgatggcacgacgactattgccaataaccttaccagcacggttcaagtgtttacggactcggagtatcagctcccgtacgtgctcgggtcggcgcaccaaggctgtctcccgccgtttccagcggacgtcttcatgatccctcagtatggatacctcaccctgaacaacggaagtcaagcggtgggacgctcatccttttactgcctggagtacttcccttcgcagatgctaaggactggaaataacttcacattcagctataccttcgaggatgtaccttttcacagcagctacgctcacagccagagtttggatcgcttgatgaatcctcttattgatcagtatctgtactacctgagcagaacgcaaacaacctctggaacaacccaacaatcacggctgcaatttagccaggctgggccttcgtctatggctcagcaggccaaaaattggctacctgggccctgctaccggcaacagagagtttcaaagactgctaacgacaacaacaacagtaactttgcttggacaggggccaccaaatatcatctcaatggccgcgactcgctggtgaatccaggaccagctatggccagtcacaaggacgatgaagaaaaatttttccctatgcacggcgttctaatatttggcaaacaagggacaggggcaagtaacgtagatttagataatgtaatgattacggatgaagaagagattcgtaccaccaatcctgtggcaacagagcagtatggaactgtggcaactaacttgcagagctcaaatacagctcccgcgactggaactgtcaatagtcagggggccttacctggcatggtgtggcaagatcgtgacgtgtaccttcaaggacctatctgggcaaagattcctcacacggatggacactttcatccttctcctctgatgggaggctttggactgaaacatccgcctcctcaaatcttgatcaaaaatactccggtaccggcaaatcctccgacgactttcagcccggccaagtttgcttcatttatcactcagtactccactggacaggtcagcgtggaaattgagtgggagctacagaaagaaaacagcaaacgttggaatccagagattcagtacacttccaactacaacaagtctgttaatgtggactttactgtagacactaatggtgtttatagtgaacctcgccctattggaacccggtatctcacacgaaacttg

SEQ ID NO: 930 - protein, 736 aa, Artificial Sequence
  source: /note="Description of Artificial Sequence: Synthetic polypeptide"
MAADGYLPDWLEDNLSEGIREWWDLKPGAPKPKANQQKQDDGRGLVLPGYKYLGPFNGLDKGEPVNAADAAALEHDKAYDQQLKAGDNPYLRYNHADAEFQERLQEDTSFGGNLGRAVFQAKKRVLEPLGLVEEGAKTAPGKKRPVEQSPQEPDSSSGIGKKGQQPARKRLNFGQTGDSESVPDPQPLGEPPAAPSGVGSNTMAAGGGAPMADNNEGADGVGNASGNWHCDSTWLGDRVITTSTRTWALPTYNNHLYKQISSQSGGSTNDNTYFGYSTPWGYFDFNRFHCHFSPRDWQRLINNNWGFRPKRLNFKLFNIQVKEVTTNDGTTTIANNLTSTVQVFTDSEYQLPYVLGSAHQGCLPPFPADVFMIPQYGYLTLNNGSQAVGRSSFYCLEYFPSQMLRTGNNFEFSYTFEDVPFHSSYAHSQSLDRLMNPLIDQYLYYLSRTQTTSGTAGNRTLQFSQAGPSSMANQAKNWLPGPCYRQQRVSKTANQNNNSNFAWTGATKYHLNGRDSLVNPGPAMATHKDDEDKFFPMSGVLIFGKQGAGNSNVDLDNVMITNEEEIKTTNPVATEQYGTVATNLQSANTAPATGTVNSQGALPGMVWQDRDVYLQGPIWAKIPHTDGHFHPSPLMGGFGLKHPPPQILIKNTPVPANPPTTFSPAKFASFITQYSTGQVSVEIEWELQKENSKRWNPEIQYTSNYNKSTNVDFAVDTNGVYSEPRPIGTRYLTRNL

SEQ ID NO: 931 - protein, 736 aa, Artificial Sequence
  source: /note="Description of Artificial Sequence: Synthetic polypeptide"
MAADGYLPDWLEDNLSEGIREWWDLKPGAPKPKANQQKQDDGRGLVLPGYKYLGPFNGLDKGEPVNAADAAALEHDKAYDQQLKAGDNPYLRYNHADAEFQERLQEDTSFGGNLGRAVFQAKKRVLEPLGLVEEGAKTAPGKKRPVEQSPQEPDSSSGIGKKGQQPAKKRLNFGQTGDSESVPDPQPLGEPPAAPSGVGSNTMASGGGAPMADNNEGADGVGNASGNWHCDSTWLGDRVITTSTRTWALPTYNNHLYKQISSQSGASTNDNTYFGYSTPWGYFDFNRFHCHFSPRDWQRLINNNWGFRPKRLNFKLFNIQVKEVTTNDGTTTIANNLTSTVQVFTDSEYQLPYVLGSAHQGCLPPFPADVFMIPQYGYLTLNNGSQAVGRSSFYCLEYFPSQMLRTGNNFQFSYTFEDVPFHSSYAHSQSLDRLMNPLIDQYLYYLSRTQTTSGTAGNRELQFSQAGPSSMANQAKNWLPGPCYRQQRVSKTTNQNNNSNFAWTGATKYHLNGRDSLVNPGPAMATHKDDEDKFFPMSGVLIFGKQGAGNSNVDLDNVMITNEEEIKTTNPVATEEYGTVATNLQSANTAPATGTVNSQGALPGMVWQNRDVYLQGPIWAKIPHTDGHFHPSPLMGGFGLKHPPPQILIKNTPVPANPPTTFSPAKFASFITQYSTGQVSVEIEWELQKENSKRWNPEIQYTSNYNKSTNVDFAVDTNGVYSEPRPIGTRYLTRNL

SEQ ID NO: 932 - protein, 736 aa, Artificial Sequence
  source: /note="Description of Artificial Sequence: Synthetic polypeptide"
MAADGYLPDWLEDNLSEGIREWWDLKPGAPKPKANQQKQDDGRGLVLPGYKYLGPFNGLDKGEPVNAADAAALEHDKAYDQQLKAGDNPYLRYNHADAEFQERLQEDTSFGGNLGRAVFQAKKRVLEPLGLVEEGAKTAPGKKRPVEQSPQEPDSSSGIGKKGQQPARKRLNFGQTGDSESVPDPQPLGEPPAAPSGVGSNTMAAGGGAPMADNNEGADGVGNASGNWHCDSTWLGDRVITTSTRTWALPTYNNHLYKQISSQSGGSTNDNTYFGYSTPWGYFDFNRFHCHFSPRDWQRLINNNWGFRPKRLNFKLFNIQVKEVTTNDGTTTIANNLTSTVQVFTDSEYQLPYVLGSAHQGCLPPFPADVFMIPQYGYLTLNNGSQAVGRSSFYCLEYFPSQMLRTGNNFEFSYTFEDVPFHSSYAHSQSLDRLMNPLIDQYLYYLSRTQTTSGTAGNRELQFSQAGPSSMANQAKNWLPGPCYRQQRVSKTTNQNNNSNFAWTGATKYHLNGRDSLVNPGPAMATHKDDEDKFFPMSGVLIFGKQGAGNSNVDLDNVMITSEEEIKTTNPVATEEYGTVATNLQSSNTAPATGTVNSQGALPGMVWQERDVYLQGPIWAKIPHTDGHFHPSPLMGGFGLKHPPPQILIKNTPVPANPPTTFSPAKFASFITQYSTGQVSVEIEWELQKENSKRWNPEIQYTSNYNKSTNVDFAVDTNGVYSEPRPIGTRYLTRNL

SEQ ID NO: 933 - protein, 736 aa, Artificial Sequence
  source: /note="Description of Artificial Sequence: Synthetic polypeptide"
MAADGYLPDWLEDNLSEGIREWWDLKPGAPKPKANQQKQDDGRGLVLPGYKYLGPFNGLDKGEPVNAADAAALEHDKAYDQQLKAGDNPYLRYNHADAEFQERLQEDTSFGGNLGRAVFQAKKRVLEPLGLVEEGAKTAPGKKRPVEQSPQEPDSSSGIGKKGQQPARKRLNFGQTGDSESVPDPQPLGEPPAAPSGVGSNTMASGGGAPMADNNEGADGVGNASGNWHCDSTWLGDRVITTSTRTWALPTYNNHLYKQISSQSGGSTNDNTYFGYSTPWGYFDFNRFHCHFSPRDWQRLINNNWGFRPKKLNFKLFNIQVKEVTTNDGTTTIANNLTSTVQVFTDSEYQLPYVLGSAHQGCLPPFPADVFMIPQYGYLTLNNGSQAVGRSSFYCLEYFPSQMLRTGNNFEFSYTFEDVPFHSSYAHSQSLDRLMNPLIDQYLYYLSRTQTTSGTAGNRELQFSQAGPSSMANQAKNWLPGPCYRQQRVSKTTNQNNNSNFAWTGATKYHLNGRDSLVNPGPAMATHKDDEDKFFPMSGVLIFGKQGAGNSNVDLDNVMITSEEEIKTTNPVATEEYGTVATNLQSANTAPATGTVNSQGALPGMVWQDRDVYLQGPIWAKIPHTDGHFHPSPLMGGFGLKHPPPQILIKNTPVPANPPTTFSPAKFASFITQYSTGQVSVEIEWELQKENSKRWNPEIQYTSNYNKSTNVDFAVDTNGVYSEPRPIGTRYLTRNL

SEQ ID NO: 934 - protein, 736 aa, Artificial Sequence
  source: /note="Description of Artificial Sequence: Synthetic polypeptide"
MAADGYLPDWLEDNLSEGIREWWDLKPGAPKPKANQQKQDDGRGLVLPGYKYLGPFNGLDKGEPVNAADAAALEHDKAYDQQLKAGDNPYLRYNHADAEFQERLQEDTSFGGNLGRAVFQAKKRVLEPLGLVEEGAKTAPGKKRPVEQSPQEPDSSSGIGKKGQQPARKRLNFGQTGDSESVPDPQPLGEPPAAPSGVGSNTMAAGGGAPMADNNEGADGVGNASGNWHCDSTWLGDRVITTSTRTWALPTYNNHLYKQISSQSGGSTNDNTYFGYSTPWGYFDFNRFHCHFSPRDWQRLINNNWGFRPKKLNFKLFNIQVKEVTTNDGTTTIANNLTSTVQVFTDSEYQLPYVLGSAHQGCLPPFPADVFMIPQYGYLTLNNGSQAVGRSSFYCLEYFPSQMLRTGNNFQFSYTFEDVPFHSSYAHSQSLDRLMNPLIDQYLYYLSRTQTTSGTAGNRTLQFSQAGPSSMANQAKNWLPGPCYRQQRVSKTTNQNNNSNFAWTGATKYHLNGRDSLVNPGPAMATHKDDEDKFFPMSGVLIFGKQGAGNSNVDLDNVMITNEEEIKTTNPVATEEYGTVATNLQSANTAPATGTVNSQGALPGMVWQDRDVYLQGPIWAKIPHTDGHFHPSPLMGGFGLKHPPPQILIKNTPVPANPPTTFSPAKFASFITQYSTGQVSVEIEWELQKENSKRWNPEIQYTSNYNKSTNVDFAVDTNGVYSEPRPIGTRYLTRNL

SEQ ID NO: 935 - protein, 736 aa, Artificial Sequence
  source: /note="Description of Artificial Sequence: Synthetic polypeptide"
MAADGYLPDWLEDNLSEGIREWWDLKPGAPKPKANQQKQDDGRGLVLPGYKYLGPFNGLDKGEPVNAADAAALEHDKAYDQQLKAGDNPYLRYNHADAEFQERLQEDTSFGGNLGRAVFQAKKRVLEPLGLVEEGAKTAPGKKRPVEQSPQEPDSSSGIGKKGQQPAKKRLNFGQTGDSESVPDPQPLGEPPAAPSGVGSNTMAAGGGAPMADNNEGADGVGNASGNWHCDSTWLGDRVITTSTRTWALPTYNNHLYKQISSQSGGSTNDNTYFGYSTPWGYFDFNRFHCHFSPRDWQRLINNNWGFRPKKLNFKLFNIQVKEVTTNDGTTTIANNLTSTVQVFTDSEYQLPYVLGSAHQGCLPPFPADVFMIPQYGYLTLNNGSQAVGRSSFYCLEYFPSQMLRTGNNFEFSYTFEDVPFHSSYAHSQSLDRLMNPLIDQYLYYLSRTQTTSGTAGNRTLQFSQAGPSSMANQAKNWLPGPCYRQQRVSKTANQNNNSNFAWTGATKYHLNGRDSLVNPGPAMATHKDDEDKFFPMSGVLIFGKQGAGNSNVDLDNVMITSEEEIKTTNPVATEQYGTVATNLQSSNTAPATGTVNSQGALPGMVWQNRDVYLQGPIWAKIPHTDGHFHPSPLMGGFGLKHPPPQILIKNTPVPANPPTTFSPAKFASFITQYSTGQVSVEIEWELQKENSKRWNPEIQYTSNYNKSTNVDFAVDTNGVYSEPRPIGTRYLTRNL

SEQ ID NO: 936 - protein, 736 aa, Artificial Sequence
  source: /note="Description of Artificial Sequence: Synthetic polypeptide"
MAADGYLPDWLEDNLSEGIREWWDLKPGAPKPKANQQKQDDGRGLVLPGYKYLGPFNGLDKGEPVNAADAAALEHDKAYDQQLKAGDNPYLRYNHADAEFQERLQEDTSFGGNLGRAVFQAKKRVLEPLGLVEEGAKTAPGKKRPVEQSPQEPDSSSGIGKKGQQPAKKRLNFGQTGDSESVPDPQPLGEPPAAPSGVGSNTMASGGGAPMADNNEGADGVGNASGNWHCDSTWLGDRVITTSTRTWALPTYNNHLYKQISSQSGGSTNDNTYFGYSTPWGYFDFNRFHCHFSPRDWQRLINNNWGFRPKKLNFKLFNIQVKEVTTNDGTTTIANNLTSTVQVFTDSEYQLPYVLGSAHQGCLPPFPADVFMIPQYGYLTLNNGSQAVGRSSFYCLEYFPSQMLRTGNNFEFSYTFEDVPFHSSYAHSQSLDRLMNPLIDQYLYYLSRTQTTSGTAGNRTLQFSQAGPSSMANQAKNWLPGPCYRQQRVSKTANQNNNSNFAWTGATKYHLNGRDSLVNPGPAMATHKDDEDKFFPMSGVLIFGKQGAGNSNVDLDNVMITSEEEIKTTNPVATEEYGTVATNLQSSNTAPATGTVNSQGALPGMVWQNRDVYLQGPIWAKIPHTDGHFHPSPLMGGFGLKHPPPQILIKNTPVPANPPTTFSPAKFASFITQYSTGQVSVEIEWELQKENSKRWNPEIQYTSNYNKSTNVDFAVDTNGVYSEPRPIGTRYLTRNL

SEQ ID NO: 937 - protein, 736 aa, Artificial Sequence
  source: /note="Description of Artificial Sequence: Synthetic polypeptide"
MAADGYLPDWLEDNLSEGIREWWDLKPGAPKPKANQQKQDDGRGLVLPGYKYLGPFNGLDKGEPVNAADAAALEHDKAYDQQLKAGDNPYLRYNHADAEFQERLQEDTSFGGNLGRAVFQAKKRVLEPLGLVEEGAKTAPGKKRPVEQSPQEPDSSSGIGKKGQQPAKKRLNFGQTGDSESVPDPQPLGEPPAAPSGVGSNTMASGGGAPMADNNEGADGVGNASGNWHCDSTWLGDRVITTSTRTWALPTYNNHLYKQISSQSGGSTNDNTYFGYSTPWGYFDFNRFHCHFSPRDWQRLINNNWGFRPKKLNFKLFNIQVKEVTTNDGTTTIANNLTSTVQVFTDSEYQLPYVLGSAHQGCLPPFPADVFMIPQYGYLTLNNGSQAVGRSSFYCLEYFPSQMLRTGNNFQFSYTFEDVPFHSSYAHSQSLDRLMNPLIDQYLYYLSRTQTTSGTAGNRELQFSQAGPSSMANQAKNWLPGPCYRQQRVSKTTNQNNNSNFAWTGATKYHLNGRDSLVNPGPAMATHKDDEDKFFPMSGVLIFGKQGAGNSNVDLDNVMITNEEEIKTTNPVATEQYGTVATNLQSANTAPATGTVNSQGALPGMVWQDRDVYLQGPIWAKIPHTDGHFHPSPLMGGFGLKHPPPQILIKNTPVPANPPTTFSPAKFASFITQYSTGQVSVEIEWELQKENSKRWNPEIQYTSNYNKSTNVDFAVDTNGVYSEPRPIGTRYLTRNL

SEQ ID NO: 938 - DNA, 2211 bp, Artificial Sequence
  source: /note="Description of Artificial Sequence: Synthetic polynucleotide"
atggctgccgatggttatcttccagattggctcgaggacaacctctctgagggcattcgcgagtggtgggacttgaaacctggagccccgaaacccaaagccaaccagcaaaagcaggacgacggccggggtctggtgcttcctggctacaagtacctcggacccttcaacggactcgacaagggggagcccgtcaacgcggcggacgcagcggccctcgagcacgacaaggcctacgaccagcagctcaaagcgggtgacaatccgtacctgcggtataaccacgccgacgccgagtttcaggagcgtctgcaagaagatacgtcttttgggggcaacctcgggcgagcagtcttccaggccaagaagcgggttctcgaacctctcggtctggttgaggaaggcgctaagacggctcctggaaagaagagaccggtagagcaatcaccccaggaaccagactcctcttcgggcatcggcaagaaaggccagcagcccgcgaaaaagagactcaactttgggcagacaggcgactcagagtcagtgcccgaccctcaaccactcggagaaccccccgcagccccctctggtgtgggatctaatacaatggctgcaggcggtggcgctccaatggcagacaataacgaaggcgccgacggagtgggtaacgcctcaggaaattggcattgcgattccacatggctgggcgacagagtcatcaccaccagcacccgaacctgggccctccccacctacaacaaccacctctacaagcaaatctccagccaatcgggagcaagcaccaacgacaacacctacttcggctacagcaccccctgggggtattttgactttaacagattccactgccacttctcaccacgtgactggcagcgactcatcaacaacaactggggattccggcccaagagactcaacttcaagctcttcaacatccaggtcaaggaggtcacgacgaatgatggcaccacgaccatcgccaataaccttaccagcacggttcaggtctttacggactcggaataccagctcccgtacgtcctcggctctgcgcaccagggctgcctgcctccgttcccggcggacgtcttcatgattcctcagtacgggtacctgactctgaacaatggcagtcaggccgtgggccgttcctccttctactgcctggagtactttccttctcaaatgctgagaacgggcaacaactttgagttcagctacacgtttgaggacgtgccttttcacagcagctacgcgcacagccaaagcctggaccggctgatgaaccccctcatcgaccagtacctgtactacctgtctcggactcagaccacgagtggtaccgcaggaaatcggacgttgcaattttctcaggccgggcctagtagcatggcgaatcaggccaaaaactggctacccgggccctgctaccggcagcaacgcgtctccaagacagcgaatcaaaataacaacagcaactttgcctggaccggtgccaccaagtatcatctgaatggcagagactctctggtaaatcccggtcccgctatggcaacccacaaggacgacgaagacaaattttttccgatgagcggagtcttaatatttgggaaacagggagctggaaatagcaacgtggaccttgacaacgttatgataaccagtgaggaagaaattaaaaccaccaacccagtggccacagaacagtacggcacggtggccactaacctgcaatcgtcaaacaccgctcctgctacagggaccgtcaacagtcaaggagccttacctggcatggtctggcagaaccgggacgtgtacctgcagggtcctatctgggccaagattcctcacacggacggacactttcatccctcgccgctgatgggaggctttggactgaaacacccgcctcctcagatcctgattaagaatacacctgttcccgcgaatcctccaactaccttcagtccagctaagtttgcgtcgttcatcacgcagtacagcaccggacaggtcagcgtggaaattgaatgggagctgcagaaagaaaacagcaaacgctggaacccagagattcaatacacttccaactacaacaaatctacaaatgtggactttgctgttgacacaaatggcgtttattctgagcctcgccccatcggcacccgttacctcacccgtaatctgtaa

SEQ ID NO: 939 - protein, 738 aa, Artificial Sequence; identical to SEQ ID NO: 18
  source: /note="Description of Artificial Sequence: Synthetic polypeptide"

SEQ ID NO: 940 - DNA, 2211 bp, Artificial Sequence
  source: /note="Description of Artificial Sequence: Synthetic polynucleotide"
atggctgccgatggttatcttccagattggctcgaggacaacctctctgagggcattcgcgagtggtgggacttgaaacctggagccccgaaacccaaagccaaccagcaaaagcaggacgacggccggggtctggtgcttcctggctacaagtacctcggacccttcaacggactcgacaagggggagcccgtcaacgcggcggacgcagcggccctcgagcacgacaaggcctacgaccagcagctcaaagcgggtgacaatccgtacctgcggtataaccacgccgacgccgagtttcaggagcgtctgcaagaagatacgtcttttgggggcaacctcgggcgagcagtcttccaggccaagaagcgggttctcgaaccttttggtctggttgaggaaggcgctaagacggctcctggaaagaaacgtccggtagagcagtcgccacaagagccagactcctcctcgggcatcggcaagacaggccagcagcccgctaaaaagagactcaattttggtcagactggcgactcagagtcagtccccgacccacaacctctcggagaacctccagcaacccccgctgctgtgggacctactacaatggcttcaggcggtggcgcaccaatggcagacaataacgaaggcgccgacggagtgggtaatgcctcaggaaattggcattgcgattccacatggctgggcgacagagtcatcaccaccagcacccgcacctgggccttgcccacctacaataaccacctctacaagcaaatctccagtgcttcaacgggggccagcaacgacaaccactacttcggctacagcaccccctgggggtattttgatttcaacagattccactgccacttttcaccgcgtgactggcagcgactcatcaacaacaattggggattccggcccaagagactcaacttcaagctcttcaacatccaagtcaaggaggtcacgacgagtgatggcgtcacaaccatcgctaataaccttaccagcacggttcaagtcttctcggactcggagtaccagcttccgtacgtcctcggctctgcgcaccagggctgcctccctccgttcccggcggacgtgttcatgattccgcaatacggctacctgacgctcaacaatggcagccaagccgtgggacgttcatccttttactgcctggaatatttcccttctcagatgctgagaacgggcaacaactttaccttcagctacacctttgaggaagtgcctttccacagcagctacgcgcacagccagagcctggaccggctgatgaatcctctcatcgaccaatacctgtattacctgaacagaactcaaaatcagtccggaagtgcccaaaacaaggacttgctgtttagccgtgggtctccagctggcatgtctgttcagcccaaaaactggctacctggaccctgttatcggcagcagcgcgtttctaaaacaaaaacaggcaacaacaacagcaattttacctggactggtgcttcaaaatataacctcaatgggcatgaatccatcatcaaccctggcactgctatggcctcacacaaagacgacgaagacaagttctttcccatgagcggtgtcatgatttttggaaaagagagcgccggagcttcaaacactgcattggacaatgtcatgattacagacgaagaggaaattaaagccactaaccctgtggccaccgaaagatttgggaccgtggcagtcaatttccagagcagcagcacacaccctgcgaccggagatgtgcatgttatgggagcattacctggcatggtgtggcaagatagagacgtgtacctgcagggtcccatctgggccaaaattcctcacacagatggacactttcacccgtctcctcttatgggcggctttggactcaagcacccgcctcctcagatcctcatcaaaaacacgcctgttcctgcgaatcctccggcggagttttcagctacaaagtttgcttcattcatcacccaatactccacaggacaagtgagtgtggaaattgaatgggagctgcagaaagaaaacagcaagcgctggaatcccgaagtgcagtacacatccaattatgcaaaatctgccaacgttgattttaccgtggacaacaatggactttatactgagcctcgccccattggcacccgttaccttacccgtcccctgtaa

SEQ ID NO: 941 - DNA, 2211 bp, Artificial Sequence; identical to SEQ ID NO: 940
  source: /note="Description of Artificial Sequence: Synthetic polynucleotide"

SEQ ID NO: 942 - DNA, 2202 bp, Artificial Sequence
  source: /note="Description of Artificial Sequence: Synthetic polynucleotide"
atgactgacggttaccttccagattggctagaggacaacctctctgaaggcgttcgagagtggtgggcgctgcaacctggagcccctaaacccaaggcaaatcaacaacatcaggacaacgctcggggtcttgtgcttccgggttacaaatacctcggacccggcaacggacttgacaagggggaacccgtcaacgcagcggacgcggcagccctcgaacacgacaaggcctacgaccagcagctcaaggccggtgacaacccctacctcaagtacaaccacgccgacgccgagtttcaggagcgtcttcaagaagatacgtcttttgggggcaacctcggacgagcagtcttccaggccaaaaagaggatccttgagcctctgggtctggttgaggaagcggctaagacggctcctggaaaaaagagacctgtagagcaatctccagcagaaccggactcctcttcgggcatcggcaaatcaggccagcagcccgctagaaaaagactgaattttggtcagactggcgacacagagtcagtcccagaccctcaaccactcggacaacctcccgcagccccctctggtgtgggatctactacaatggcttcaggcggtggcgcaccaatggcagacaataacgagggtgccgatggagtgggtaattcctcaggaaattggcattgcgattcccaatggctgggcgacagagtcatcaccaccagcacccgcacctgggccctgcccacctacaacaatcacctctacaagcaaatctccagccaatcaggagccaccaacgacaaccactactttggctacagcaccccctgggggtattttgacttcaacagattccactgccacttttcaccacgtgactggcaaagactcatcaacaacaactggggattccgacccaagagactcaacttcaagctctttaacattcaagtcaaagaggtcacgcagaatgacggtacgacgacgattgccaataaccttaccagcacggttcaggtgtttactgactccgagtaccagctcccgtacgtcctcggctcggcgcatcagggatgcctcccgccgttcccagcagacgtcttcatggtcccacagtatggatacctcaccctgaacaacgggagtcaggcggtaggacgctcttccttttactgcctggagtactttccttctcagatgctgcgtactggaaacaactttcagtttagctacacttttgaagacgtgcctttccacagcagctacgctcacagccaaagtctggaccgtctcatgaatcctctgatcgaccagtacctgtactatctgaacaggacacaaacagccagtggaactcagcagtctcggctactgtttagccaagctggacccaccagtatgtctcttcaagctaaaaactggctgcctggaccttgctacagacagcagcgtctgtcaaagcaggcaaacgacaacaacaacagcaactttccctggactggtgccaccaaatatcatctgaatggccgggactcattggtgaacccgggccctgctatggccagtcacaaggatgacaaagaaaagtttttccccatgcatggaaccctgatatttggtaaagaaggaacaaatgccaacaacgcggatttggaaaatgtcatgattacagatgaagaagaaatccgcaccaccaatcccgtggctacggagcagtacgggactgtgtcaaataatttgcaaaactcaaacgctggtccaactactggaactgtcaatcaccaaggagcgttacctggtatggtgtggcaggatcgagacgtgtacctgcagggacccatttgggccaagattcctcacaccgatggacactttcatccttctccactgatgggaggttttgggctcaaacacccgcctcctcagatcatgatcaaaaacactcccgttccagccaatcctcccacaaactttagtgcggcaaagtttgcttccttcatcacacagtactccacggggcaggtcagcgtggagatcgagtgggagctgcagaaggagaacagcaaacgctggaatcccgaaattcagtacacttccaactacaacaaatctgttaatgtggactttactgtggacactaatggtgtgtattcagagcctcgccccattggcaccagatacctgactcgtaatctgtaa

SEQ ID NO: 943 - DNA, 2211 bp, Artificial Sequence
  source: /note="Description of Artificial Sequence: Synthetic polynucleotide"
atggctgccgatggttatcttccagattggctcgaggacaacctctctgagggcattcgcgagtggtgggacttgaaacctggagccccgaaacccaaagccaaccagcaaaagcaggacgacggccggggtctggtgcttcctggctacaagtacctcggacccttcaacggactcgacaagggggagcccgtcaacgcggcggacgcagcggccctcgagcacgacaaggcctacgaccagcagctcaaagcgggtgacaatccgtacctgcggtataaccacgccgacgccgagtttcaggagcgtctgcaagaagatacgtcttttgggggcaacctcgggcgagcagtcttccaggccaagaagcgggttctcgaaccttttggtctggttgaggaaggcgctaagacggctcctggaaagaaacgtccggtagagcagtcgccacaagagccagactcctcctcgggcatcggcaagacaggccagcagcccgctaaaaagagactcaattttggtcagactggcgactcagagtcagtccccgacccacaacctctcggagaacctccagcaacccccgctgctgtgggacctactacaatggcttcaggcggtggcgcaccaatggcagacaataacgaaggcgccgacggagtgggtaatgcctcaggaaattggcattgcgattccacatggctgggcgacagagtcatcaccaccagcacccgcacctgggccttgcccacctacaataaccacctctacaagcaaatctccagtgcttcaacgggggccagcaacgacaaccactacttcggctacagcaccccctgggggtattttgatttcaacagattccactgccacttttcaccacgtgactggcagcgactcatcaacaacaattggggattccggcccaagagactcaacttcaagctcttcaacatccaagtcaaggaggtcacgacgaatgatggcgtcacaaccatcgctaataaccttaccagcacggttcaagtcttctcggactcggagtaccagcttccgtacgtcctcggctctgcgcaccagggctgcctccctccgttcccggcggacgtgttcatgattccgcaatacggctacctgacgctcaacaatggcagccaagccgtgggacgttcatccttttactgcctggaatatttcccttctcagatgctgagaacgggcaacaactttaccttcagctacacctttgaggaagtgcctttccacagcagctacgcgcacagccagagcctggaccggctgatgaatcctctcatcgaccaatacctgtattacctgaacagaactcaaaatcagtccggaagtgcccaaaacaaggacttgctgtttagccgtgggtctccagctggcatgtctgttcagcccaaaaactggctacctggaccctgttatcggcagcagcgcgtttctaaaacaaaaacagacaacaacaacagcaattttacctggactggtgcttcaaaatataacctcaatgggcgtgaatccatcatcaaccctggcactgctatggcctcacacaaagacgacgaagacaagttctttcccatgagcggtgtcatgatttttggaaaagagagcgccggagcttcaaacactgcattggacaatgtcatgattacagacgaagaggaaattaaagccactaaccctgtggccaccgaaagatttgggaccgtggcagtcaatttccagagcagcagcacagaccctgcgaccggagatgtgcatgttatgggagcattacctggcatggtgtggcaagatagagacgtgtacctgcagggtcccatctgggccaaaattcctcacacagatggacactttcacccgtctcctcttatgggcggctttggactcaagcacccgcctcctcagatcctcatcaaaaacacgcctgttcctgcgaatcctccggcggagttttcagctacaaagtttgcttcattcatcacccaatactccacaggacaagtgagtgtggaaattgaatgggagctgcagaaagaaaacagcaagcgctggaatcccgaagtgcagtacacatccaattatgcaaaatctgccaacgttgattttaccgtggacaacaatggactttatactgagcctcgccccattggcacccgttaccttacccgtcccctgtaa

SEQ ID NO: 944 - DNA, 2211 bp, Artificial Sequence
  source: /note="Description of Artificial Sequence: Synthetic polynucleotide"
atggctgccgatggttatcttccagattggctcgaggacaacctctctgagggcattcgcaagtggtgggacttgaaacctggagccccgaaacccaaagccaaccagcaaaagcaggacgacggccggggtctggtgcttcctggctacaagtacctcggacccttcaacggactcgacaagggggagcccgtcaacgcggcggacgcagcggccctcgagcacgacaaggcctacgaccagcagctcaaagcgggtgacaatccgtacctgcggtataaccacgccgacgccgagtttcaggagcgtctgcaagaagatacgtcttttgggggcaacctcgggagagcagtcttccaggccaagaagcgggttctcgaaccttttggtctggttgaggaaggcgctaagacggctcctggaaagaaacgtccggtagagcagtcgccacaagagccagactcctcctcgggcatcggcaagacaggccagcagcccgctaaaaagagactcaattttggtcagactggcgactcagagtcagtccccgacccacaacctctcggagaacctccagcaacccccgctgctgtgggacctactacaatggcttcaggcggtggcgcaccaatggcagacaataacgaaggcgccgacggagtgggtaatgcctcaggaaattggcattgcgattccacatggctgggcgacagagtcatcaccaccagcacccgcacctgggccttgcccacctacaataaccacctctacaagcaaatctccagtgcttcaacgggggccagcaacgacaaccactacttcggctacagcaccccctgggggtattttgatttcaacagattccactgccacttttcaccacgtgactggcagcgactcatcaacaacaattggggattccggcccaagagactcaacttcaagctcttcaacatccaagtcaaggaggtcacgacgaatgatggcgtcacaaccatcgctaataaccttaccagcacggttcaagtcttctcggactcggagtaccagcttccgtacgtcctcggctctgcgcaccagggctgcctccctccgttcccggcggacgtgttcatgattccgcaatacggctacctgacgctcaacaatggcagccaagccgtgggacgttcatccttttactgcctggaatatttcccttctcagatgctgagaacgggcaacaactttaccttcagctacacctttgaggaagtgcctttccacagcagctacgcgcacagccagagcctggaccggctgatgaatcctctcatcgaccaatacctgtattacctgaacagaactcaaaatcagtccggaagtgcccaaaacaaggacttgctgtttagccgtgggtctccagctggcatgtctgttcagcccaaaaactggctacctggaccctgttatcggcagcagcgcgtttctaaaacaaaaacagacaacaacaacagcaattttacctggactggtgcttcaaaatataacctcaatgggcgtgaatccatcatcaaccctggcactgctatggcctcacacaaagacgacaaagacaagttctttcccatgagcggtgtcatgatttttggaaaagagagcgccggagcttcaaacactgcattggacaatgtcatgattacagacgaagaggaaattaaagccactaaccctgtggccaccgaaagatttgggaccgtggcagtcaatttccagagcagcagcacagaccctgcgaccggagatgtgcatgttatgggagcattacctggcatggtgtggcaagatagagacgtgtacctgcagggtcccatttgggccaaaattcctcacacagatggacactttcacccgtctcctcttatgggcggctttggactcaagcacccgcctcctcagatcctcatcaaaaacacacctgttcctgcgaatcctccggcggagttttcagctacaaagtttgcttcattcatcacccaatactccacaggacaagtgagtgtggaaattgaatgggagctgcagaaagaaaacagcaagcgctggaatcccgaagtgcagtacacatccaattatgcaaaatctgccaacgttgattttaccgtggacaacaatggactttatactgagcctcgccccattggcacccgttaccttacccgtcccctgtaa

SEQ ID NO: 945 - DNA, 2211 bp, Artificial Sequence
  source: /note="Description of Artificial Sequence: Synthetic polynucleotide"
atggctgccgatggttatcttccagattggctcgaggacaacctctctgagggcattcgcgagtggtgggacttgaaacctggagccccgaaacccaaagccaaccagcaaaagcaggacaacggccggggtctggtgcttcctggctacaagtacctcggacccttcaacggactcgacaagggggagcccgtcaacgcggcggacgcagcggccctcgagcacgacaaggcctacgaccagcagctcaaagcgggtgacaatccgtacctgcggtataaccacgccgacgccgagtttcaggagcgtctgcaagaagatacgtcttttgggggcaacctcgggcgagcagtcttccaggccaagaagcgggttctcgaaccttttggtctggttgaggaaggcgctaagacggctcctggaaagaaacgtccggtagagcagtcgccacaagagccagactcctcctcgggcatcggcaagacaggccagcagcccgctaaaaagagactcaattttggtcagactggcgactcagagtcagtccccgacccacaacctctcggagaacctccagcaacccccgctgctgtgggacctactacaatggcttcaggcggtggcgcaccaatggcagacaataacgaaggcgccgacggagtgggtaatgcctcaggaaattggcattgcgattccacatggctgggcgacagagtcatcaccaccagcacccgcacctgggccttgcccacctacaataaccacctctacaagcaaatctccagtgcttcaacgggggccagcaacgacaaccactacttcggctacagcaccccctgggggtattttgatttcaacagattccactgccacttttcaccacgtgactggcagcgactcatcaacaacaattggggattccggcccaagagactcaacttcaagctcttcaacatccaagtcaaggaggtcacgacgaatgatggcgtcacaaccatcgctaataaccttaccagcacggttcaagtcttctcggactcggagtaccagcttccgtacgtcctcggctctgcgcaccagggctgcctccctccgttcccggcggacgtgttcatgattccgcaatacggctacctgacgctcaacaatggcagccaagccgtgggacgttcatccttttactgcctggaatatttcccttctcagatgctgagaacgggcaacaactttaccttcagctacacctttgaggaagtgcctttccacagcagctacgcgcacagccagagcctggaccggctgatgaatcctctcatcgaccaatacctgtattacctgaacagaactcaaaatcagtccggaagtgcccaaaacaaggacttgctgtttagccgtgggtctccagctggcatgtctgttcagcccaaaaactggctacctggaccctgttatcggcagcagcgcgtttctaaaacaaaaacagacaacaacaacagcaattttacctggactggtgcttcaaaatataacctcaatgggcgtgaatccatcatcaaccctggcactgctatggcctcacacaaagacgacgaagacaagttctttcccatgagcggtgtcatgatttttggaaaagagagcgccggagcttcaaacactgcattggacaatgtcatgattacagacgaagaggaaattaaagccactaaccctgtggccaccgaaagatttgggaccgtggcagtcaatttccagagcagcagcacacaccctgcgaccggagatgtgcatgttatgggagcattacctggcatggtgtggcaagatagagacgtgtacctgcagggtcccatctgggccaaaattcctcacacagatggacactttcacccgtctcctcttatgggcggctttggactcaagcacccgcctcctcagatcctcatcaaaaacacgcctgttcctgcgaatcctccggcggagttttcagctacaaagtttgcttcattcatcacccaatactccacaggacaagtgagtgtggaaattgaatgggagctgcagaaagaaaacagcaagcgctggaatcccgaagtgcagtacacatccaattatgcaaaatctgccaacgttgattttaccgtggacaacaatggactttatactgagcctcgccccattggcacccgttaccttacccgtcccctgtaa

SEQ ID NO: 946 - DNA, 2211 bp, Artificial Sequence
  source: /note="Description of Artificial Sequence: Synthetic polynucleotide"
atggctgccgatggttatcttccagattggctcgaggacaacctctctgagggcattcgcgagtggtgggacttgaaacctggagccccgaaacccaaagccaaccagcaaaagcaggacgacggccggggtctggtgcttcctggctacaagtacctcggacccttcaacggactcgacaagggggagcccgtcaacgcggcggacgcagcggccctcgagcacgacaaggcctacgaccagcagctcaaagcgggtgacaatccgtacctgcggtataaccacgccgacgccgagtttcaggagcgtctgcaagaagatacgtcttttgggggcaacctcgggcgagcagtcttccaggccaaaaagcgggttctcgaaccttttggtctggttgaggaaggcgctaagacggctcctggaaagaaacgtccggtagagcagtcgccacaagagccagactcctcctcgggcatcggcaagacaggccagcagcccgctaaaaagagactcaattttggtcagactggcgactcagagtcagtccccgacccacaacctctcggagaacctccagcaacccccgctgctgtgggacctactacaatggcttcaggcggtggcgcaccaatggcagacaataacgaaggcgccgacggagtgggtaatgcctcaggaaattggcattgcgattccacatggctgggcgacagagtcatcaccaccagcacccgcacctgggccttgcccacctacaataaccacctctacaagcaaatctccagtgcttcaacgggggccagcaacgacaaccactacttcggctacagcaccccctgggggtattttgatttcaacagattccactgccacttttcaccacgtgactggcagcgactcatcaacaacaattggggattccggcccaagagactcaacttcaagctcttcaacatccaagtcaaggaggtcacgacgaatgatggcgtcacaaccatcgctaataaccttaccagcacggttcaagtcttctcggactcggagtaccagcttccgtacgtcctcggctctgcgcaccagggctgcctccctccgttcccggcggacgtgttcatgattccgcaatacggctacctgacgctcaacaatggcagccaagccgtgggacgttcatccttttattgcctggaatatttcccatcgcagatgctgagaacgggcaataactttaccttcagctacacctttgaggacgtgcctttccacagcagctacgcgcacagccagagcctggaccggctgatgaatcctctcatcgaccagtacctgtattacctgaacagaactcagaaccagtccggaagtgcccaaaacaaggacttgctgtttagccgggggtctccagctggcatgtctgttcagctcaaaaactggctacctggaccctgttatcggcagcagcgcgtttctaaaacaaaaacagacaacaacaacagcaattttacctggactggtgcttcaaaatataaccttaatgggcgtgaatccatcatcaaccctggcactgctatggcctcacacaaagacgacgaagacaagttctttcccatgagcggtgtcatgatttttggaaaagagagcgccggagcttcaaacactgcattggacaatgtcatgattacagacgaagaggaaattaaagccactaaccctgtggccaccgaaagatttgggaccgtggcagtcaatttccagagcagcagcacagaccctgcgaccggagatgtgcatgttatgggagcattacctggcatggtgtggcaagatagagacgtgtacctgcagggtcccatttgggccaaaattcctcacacagatggacactttcacccgtctcctcttatgggcggctttggactcaaacacccgcctcctcagatcctcatcaaaaacacacctgttcctgcgaatcctccggcggagttttcagctacaaagtttgcttcattcatcacccaatactccacaggacaagtgagcgtggaaattgaatgggagctgcagaaagaaaacagcaagcgctggaatcccgaagtgcagtacacatccaattatgcaaaatctgccaacgttgattttaccgtggacaacaatggactttatactgagcctcgccccattggcacccgttaccttacccgtcccctgtaa

SEQ ID NO: 947 - DNA, 2211 bp, Artificial Sequence
  source: /note="Description of Artificial Sequence: Synthetic polynucleotide"
atggctgccgatggttatcttccagattggctcgaggacaacctctctgagggcattcgcgagtggtgggacttgaaacctggagccccgaaacccaaagccaaccagcaaaagcaggacgacggccggggtctggtgcttcctggctacaagtacctcggacccttcaacggactcgacaagggggagcccgtcaacgcggcggacgcagcggccctcgagcacgacaaggcctacgaccagcagctcaaagcgggtgacaatccgtacctgcggtataaccacgccgacgccgagtttcaggagcgtctgcaagaagatacgtcttttgggggcaacctcgggcgagcagtcttccaggccaagaagcgggttctcgaaccttttggtctggttgaggaaggtgctaagacggctcctggaaagaagagaccggtagagcagtcgccccaagaaccagactcctcatcgggcatcggcaaatcaggccagcagcccgctaaaaagagactcaattttggtcagactggcgactcagagtcagtccccgacccacaacctctcggagaacctccagcaacccccgctgctgtgggacctactacaatggcttcaggcggtggcgcaccaatggcagacaataacgaaggcgccgacggagtgggtaatgcctcaggaaattggcattgcgattccacatggctgggcgacagagtcattaccaccagcacccgaacctgggccctgcccacctataacaaccacctctacaaacaaatctccagcgcttcaacgggggccagcaacgacaaccactacttcggctacagcaccccctgggggtattttgattttaacagattccactgccacttctcaccacgtgactggcagcgactcatcaacaacaattggggattccggcccaagagactcaacttcaagctcttcaacatccaagtcaaggaggtcacgacgaacgatggcgtcacgaccatcgctaataaccttaccagcacggttcaagtcttctcggactcggagtaccagttgccgtacgtcctcggctctgcgcaccagggctgcctccctccgttcccggcggacgtgttcatgattccgcagtacggctacctaacactcaacaatggcagccaggccgtgggacgttcatccttttactgcctggaatatttcccatcgcagatgctgagaacgggcaataactttaccttcagctacacattcgaggacgtgcctttccacagcagctacgcgcacagccaaagcctggaccggctgatgaatcctctcatcgaccagtacttgtattacctaaacagaactcaaaatcagtccggaagtgcccaaaacaaggacttgctgtttagccgggggtctccagctggcatgtctgttcagcccaaaaactggctacctggaccctgttatcggcagcagcgcgtttctaaaacaaaaacagacaacaacaacagcaactttacctggactggtgcttcaaaatataaccttaatgggcgtgaatctataatcaaccctggcactgctatggcttcacacaaagacgacgaagacaagttctttccaatgagcggtgtcatgatttttggcaaggagagcgccggagcttcaaacactgcattggacaatgtcatgattacagacgaagaggaaattaaagccactaaccctgtggccaccgaaagatttgggaccgtggcagtcaatttccagagcagcagcacagaccctgcgaccggagatgtgcatgttatgggagcattacctggcatggtgtggcaagatagagacgtgtacctgcagggtccaatttgggccaaaattcctcacacagatggacactttcacccgtctcctcttatgggcggctttggacttaagcacccgcctcctcagatcctcatcaaaaacacgcctgttcctgcgaatcctccggcagagttttcggctacaaagtttgcttcattcatcacccagtattccacaggacaagtgagtgtggaaattgaatgggagttgcagaaagaaaacagcaagcgttggaatcccgaagtgcagtacacatctaattatgcaaaatctgccaacgttgatttcactgtggacaacaatggactttatactgagcctcgccccattggcacccgttacctcacccgtcccctgtaa

SEQ ID NO: 948 - DNA, 2211 bp, Artificial Sequence
  source: /note="Description of Artificial Sequence: Synthetic polynucleotide"
atggctgccgatggttatcttccagattggctcgaggacaacctctctgagggcattcgcgagtggtgggacttgaaacctggagccccgaaacccaaagccaaccagcaaaagcaggacgacggccggggtctggtgcttcctggctacaagtacctcggacccttcaacggactcgacaagggggagcccgtcaacgcggcggacgcagcggccctcgagcacgacaaggcctacgaccagcagctcaaagcgggtgacaatccgtacctgcggtataaccacgccgacgccgagtttcaggagcgtctgcaagaagatacgtcttttgggggcaacctcgggcgagcagtcttccaggccaagaagagggttctcgaaccttttggtctggttgaggaaggtgctaagacggctcctggaaagaaacgtccggtagagcagtcaccccaagaaccagactcctcctcgggcattggcaaatcaggccagcagcccgctaaaaagagactcaattttggtcagactggcgactcagagtcagtccccgacccacaacctctcggagaacctccagcaacccccgctgctttgggacctactacaatggcttcaggcggtggcgcaccaatggcagacaataacgaaggcgccgacggagtgggtaatgcctcaggaaattggcattgcgattccacatggctgggcgacagagtcatcaccaccagcacccgcacctgggccttgcccacctacaataaccacctctacaagcaaatctccagtgcttcaacgggggccagcaacgacaaccactacttcggctacagcaccccctgggggtattttgatttcaacagattccactgccatttctcaccacgtgactggcagcgactcatcaacaacaactggggattccggcccaagagactcaacttcaagctcttcaacatccaagtcaaggaggtcacgacgaacgatggcgtcacgaccatcgctaataaccttaccagcacggttcaagtcttctcggactcggagtaccagcttccgtacgtcctcggctctgcgcaccagggctgcctccctccgttcccggcggacgtgttcatgattccgcagtacggctacctgacgctcaacaatggcagcaaagccgtgggacgttcatccttttactgcctggaatatttcccttctcagatgctgagaacgggcaacaactttaccttcagctacacctttgaggaagtgcctttccacagcagctacgcgcacagccagagcctggaccggctgatgaatcctctcatcgaccaatacctgtattacctgaacagaactcaaaatcagtccggaagtgcccaaaacaaggacttgctgtttagccgtgggtctccagctggcatgtctgttcagcccaaaaactggctacctggaccctgttatcggcagcagcgcgtttctaaaacaaaaacagacaacaacaacagcaattttacctggactggtgcttcaaaatataacctcaatgggcgtgaatccatcatcaaccctggcactgctatggcctcacacaaagacgacgaagacaagttctttcccatgagcggtgtcatgatttttggaaaagagagcgccggagcttcaaacactgcattggacaatgtcatgattacagacgaagaggaaattaaagccactaaccctgtggccaccgaaagatttgggaccgtggcagtcaatttccagagcagcagcacagaccctgcgaccggagatgtgcatgttatgggagcattacctggcatggtgtggcaagatagagacgtgtacctgcagggtcccatttgggccaaaattcctcacacggatggacactttcacccgtctcctcttatgggcggctttggactcaagcacccgcctcctcagatcctcatcaaaaacacacctgttcctgcgaatcctccggcagagttttcggctacaaagtttgcttcattcatcacccagtactccacaggacaagtgagcgtggaaattgaatgggagttgcagaaagaaaacagtaagcgctggaatcccgaagtgcagtacacatctaattatgcaaaatctgccaacgttgacttcactgtggacaacaatggactttatactgagcctcgccccattggcacccgttacctcacccgtcccctgtaa

SEQ ID NO: 949 - DNA, 2970 bp, Artificial Sequence
  source: /note="Description of Artificial Sequence: Synthetic polynucleotide"
agatgaccgccaaggtcgtagagtccgccaaggccattctgggcggcagcaaggtgcgcgtggaccaaaaatgcaaggcctctgcgcagatcgaccccacccccgtgatcgtcacctccaacaccaacatgtgcgccgtgattgacgggaacagcaccaccttcgagcaccagcagcccctgcaggaccggatgttcaagtttgaactcacccgccgcctcgactacgactttggcaaggtcaccaagcaggaagtcaaggactttttccggtgggcggctgatcacgtgactgacgtggctcatgagttttacgtcacaaagggtggagctaagaaaaggcccgccccctctgacgaggatataagcgagcccaagcggccgcgcgtgtcatttgcgcagccggagacgtcagacgcggaagctcccggagacttcgccgacaggtaccaaaacaaatgttctcgtcacgcgggtatgctgcagatgctctttccctgcaagacgtgcgagagaatgaatcagaattccaacgtctgcttcacgcacggtcagaaagattgcggggagtgctttcccgggtcagaatctcaaccggtttctgtcgtcagaaaaacgtatcagaaactgtgcatccttcatcagctccggggggcacccgagatcgcctgctctgcttgcgaccaactcaaccccgatttggacgattgccaatttgagcaataaatgactgaaatcaggtatggctgctgacggttatcttccagattggctcgaggacaacctctctgaaggcattcgcgagtggtgggcgctgaaacctggagctccacaacccaaggccaaccaacagcatcaggacaacggcaggggtcttgtgcttcctgggtacaagtacctcggacccttcaacggactcgacaagggagagccggtcaacgaggcagacgccgcggccctcgagcacgacaaggcctacgacaagcagctcgagcagggggacaacccgtatctcaagtacaaccacggcgacgccgagttccagcagcgcttggcgaccgacacctcttttgggggcaacctcgggcgagcagtcttccaggccaaaaagaggattctcgagcctctgggtctggttgaagagggcgttaaaacggctcctggaaagaaacgcccattagaaaagactccaaatcggccgaccaacccggactctgggaaggccccggccaagaaaaagcaaaaagacggcgaaccagccgactctgctagaaggacactcgactttgaagactctggagcaggagacggaccccctgagggatcatcttccggagaaatgtctcatgatgctgagatgcgtgcggcgccaggcggaaatgctgtcgaggcgggacaaggtgccgatggagtgggtaatgcctccggtgattggcattgcgattccacctggtcagagggccgagtcaccaccaccagcacccgaacctgggtcctacccacgtacaacaaccacctgtacctgcgaatcggaacaacggccaacagcaacacctacaacggattctccaccccctggggatactttgactttaaccgcttccactgccacttttccccacgcgactggcagcgactcatcaacaacaactggggactcaggccgaaatcgatgcgtgttaaaatcttcaacatacaggtcaaggaggtcacgacgtcaaacggcgagactacggtcgctaataaccttaccagcacggttcagatctttgcggattcgacgtatgaactcccatacgtgatggacgccggtcaggaggggagctttcctccgtttcccaacgacgtctttatggttccccaatacggatactgcggagttgtcactggaaaaaaccagaaccagacagacagaaatgccttttactgcctggaatactttccatcccaaatgctaagaactggcaacaattttgaagtcagttaccaatttgaaaaagttcctttccattcaatgtacgcgcacagccagagcctggacagaatgatgaatcctttactggatcagtacctgtggcatctgcaatcgaccactaccggaaattcccttaatcaaggaacagctaccaccacgtacgggaaaattaccactggagactttgcctactacaggaaaaactggttgcctggagcctgcattaaacaacaaaaattttcaaagaatgccaatcaaaactacaagattcccgccagcgggggagacgcccttttaaagtatgacacgcataccactctaaatgggcgatggagtaacatggctcctggacctccaatggcaaccgcaggtgccggggactcggattttagcaacagccagctgatctttgccggacccaatccgagcggtaacacgaccacatcttcaaacaatttgttgtttacctcagaagaggagattgccacaacaaacccacgagacacggacatgtttggacagattgcagataataatcaaaatgccaccaccgcccctcacatcgctaacctggacgctatgggaattgttcccggaatggtctggcaaaacagagacatctactaccagggccctatttgggccaaggtccctcacacggacggacactttcacccttcgccgctgatgggaggatttggactgaaacacccgcctccacagattttcatcaaaaacacccccgtacccgccaatcccaatactacctttagcgctgcaaggattaattcttttctgacgcagtacagcaccggacaagttgccgttcagatcgactgggaaattcagaaggagcattccaaacgctggaatcccgaagttcaatttacttcaaactacggcactcaaaattctatgctgtgggctcccgacaatgctggcaactaccacgaactccgggctattgggtcccgtttcctcacccaccacttgtaa

SEQ ID NO: 950 - protein, 736 aa, Artificial Sequence
  source: /note="Description of Artificial Sequence: Synthetic polypeptide"
MAADGYLPDWLEDNLSEGIREWWDLKPGAPKPKANQQKQDDGRGLVLPGYKYLGPFNGLDKGEPVNAADAAALEHDKAYDQQLKAGDNPYLRYNHADAEFQERLQEDTSFGGNLGRAVFQAKKRVLEPFGLVEEGAKTAPGKKRPVEQSPQEPDSSSGIGKTGQQPAKKRLNFGQTGDSESVPDPQPLGEPPATPAAVGPTTMASGGGAPMADNNEGADGVGNASGNWHCDSTWLGDRVITTSTRTWALPTYNNHLYKQISSASTGASNDNHYFGYSTPWGYFDFNRFHCHFSPRDWQRLINNNWGFRPKRLNFKLFNIQVKEVTTSDGVTTIANNLTSTVQVFSDSEYQLPYVLGSAHQGCLPPFPADVFMIPQYGYLTLNNGSQAVGRSSFYCLEYFPSQMLRTGNNFTFSYTFEEVPFHSSYAHSQSLDRLMNPLIDQYLYYLNRTQNQSGSAQNKDLLFSRGSPAGMSVQPKNWLPGPCYRQQRVSKTKTGNNNSNFTWTGASKYNLNGHESIINPGTAMASHKDDEDKFFPMSGVMIFGKESAGASNTALDNVMITDEEEIKATNPVATERFGTVAVNFQSSSTHPATGDVHVMGALPGMVWQDRDVYLQGPIWAKIPHTDGHFHPSPLMGGFGLKHPPPQILIKNTPVPANPPAEFSATKFASFITQYSTGQVSVEIEWELQKENSKRWNPEVQYTSNYAKSANVDFTVDNNGLYTEPRPIGTRYLTRPL

SEQ ID NO: 951 - protein, 736 aa, Artificial Sequence; identical to SEQ ID NO: 950
  source: /note="Description of Artificial Sequence: Synthetic polypeptide"

SEQ ID NO: 952 - protein, 733 aa, Artificial Sequence
  source: /note="Description of Artificial Sequence: Synthetic polypeptide"
MTDGYLPDWLEDNLSEGVREWWALQPGAPKPKANQQHQDNARGLVLPGYKYLGPGNGLDKGEPVNAADAAALEHDKAYDQQLKAGDNPYLKYNHADAEFQERLQEDTSFGGNLGRAVFQAKKRILEPLGLVEEAAKTAPGKKRPVEQSPAEPDSSSGIGKSGQQPARKRLNFGQTGDTESVPDPQPLGQPPAAPSGVGSTTMASGGGAPMADNNEGADGVGNSSGNWHCDSQWLGDRVITTSTRTWALPTYNNHLYKQISSQSGATNDNHYFGYSTPWGYFDFNRFHCHFSPRDWQRLINNNWGFRPKRLNFKLFNIQVKEVTQNDGTTTIANNLTSTVQVFTDSEYQLPYVLGSAHQGCLPPFPADVFMVPQYGYLTLNNGSQAVGRSSFYCLEYFPSQMLRTGNNFQFSYTFEDVPFHSSYAHSQSLDRLMNPLIDQYLYYLNRTQTASGTQQSRLLFSQAGPTSMSLQAKNWLPGPCYRQQRLSKQANDNNNSNFPWTGATKYHLNGRDSLVNPGPAMASHKDDKEKFFPMHGTLIFGKEGTNANNADLENVMITDEEEIRTTNPVATEQYGTVSNNLQNSNAGPTTGTVNHQGALPGMVWQDRDVYLQGPIWAKIPHTDGHFHPSPLMGGFGLKHPPPQIMIKNTPVPANPPTNFSAAKFASFITQYSTGQVSVEIEWELQKENSKRWNPEIQYTSNYNKSVNVDFTVDTNGVYSEPRPIGTRYLTRNL

SEQ ID NO: 953 - protein, 736 aa, Artificial Sequence; identical to SEQ ID NO: 768
  source: /note="Description of Artificial Sequence: Synthetic polypeptide"

SEQ ID NO: 954 - protein, 736 aa, Artificial Sequence
  source: /note="Description of Artificial Sequence: Synthetic polypeptide"
MAADGYLPDWLEDNLSEGIRKWWDLKPGAPKPKANQQKQDDGRGLVLPGYKYLGPFNGLDKGEPVNAADAAALEHDKAYDQQLKAGDNPYLRYNHADAEFQERLQEDTSFGGNLGRAVFQAKKRVLEPFGLVEEGAKTAPGKKRPVEQSPQEPDSSSGIGKTGQQPAKKRLNFGQTGDSESVPDPQPLGEPPATPAAVGPTTMASGGGAPMADNNEGADGVGNASGNWHCDSTWLGDRVITTSTRTWALPTYNNHLYKQISSASTGASNDNHYFGYSTPWGYFDFNRFHCHFSPRDWQRLINNNWGFRPKRLNFKLFNIQVKEVTTNDGVTTIANNLTSTVQVFSDSEYQLPYVLGSAHQGCLPPFPADVFMIPQYGYLTLNNGSQAVGRSSFYCLEYFPSQMLRTGNNFTFSYTFEEVPFHSSYAHSQSLDRLMNPLIDQYLYYLNRTQNQSGSAQNKDLLFSRGSPAGMSVQPKNWLPGPCYRQQRVSKTKTDNNNSNFTWTGASKYNLNGRESIINPGTAMASHKDDKDKFFPMSGVMIFGKESAGASNTALDNVMITDEEEIKATNPVATERFGTVAVNFQSSSTDPATGDVHVMGALPGMVWQDRDVYLQGPIWAKIPHTDGHFHPSPLMGGFGLKHPPPQILIKNTPVPANPPAEFSATKFASFITQYSTGQVSVEIEWELQKENSKRWNPEVQYTSNYAKSANVDFTVDNNGLYTEPRPIGTRYLTRPL

SEQ ID NO: 955 - protein, 736 aa, Artificial Sequence
  source: /note="Description of Artificial Sequence: Synthetic polypeptide"
MAADGYLPDWLEDNLSEGIREWWDLKPGAPKPKANQQKQDNGRGLVLPGYKYLGPFNGLDKGEPVNAADAAALEHDKAYDQQLKAGDNPYLRYNHADAEFQERLQEDTSFGGNLGRAVFQAKKRVLEPFGLVEEGAKTAPGKKRPVEQSPQEPDSSSGIGKTGQQPAKKRLNFGQTGDSESVPDPQPLGEPPATPAAVGPTTMASGGGAPMADNNEGADGVGNASGNWHCDSTWLGDRVITTSTRTWALPTYNNHLYKQISSASTGASNDNHYFGYSTPWGYFDFNRFHCHFSPRDWQRLINNNWGFRPKRLNFKLFNIQVKEVTTNDGVTTIANNLTSTVQVFSDSEYQLPYVLGSAHQGCLPPFPADVFMIPQYGYLTLNNGSQAVGRSSFYCLEYFPSQMLRTGNNFTFSYTFEEVPFHSSYAHSQSLDRLMNPLIDQYLYYLNRTQNQSGSAQNKDLLFSRGSPAGMSVQPKNWLPGPCYRQQRVSKTKTDNNNSNFTWTGASKYNLNGRESIINPGTAMASHKDDEDKFFPMSGVMIFGKESAGASNTALDNVMITDEEEIKATNPVATERFGTVAVNFQSSSTHPATGDVHVMGALPGMVWQDRDVYLQGPIWAKIPHTDGHFHPSPLMGGFGLKHPPPQILIKNTPVPANPPAEFSATKFASFITQYSTGQVSVEIEWELQKENSKRWNPEVQYTSNYAKSANVDFTVDNNGLYTEPRPIGTRYLTRPL

SEQ ID NO: 956 - protein, 736 aa, Artificial Sequence
  source: /note="Description of Artificial Sequence: Synthetic polypeptide"
MAADGYLPDWLEDNLSEGIREWWDLKPGAPKPKANQQKQDDGRGLVLPGYKYLGPFNGLDKGEPVNAADAAALEHDKAYDQQLKAGDNPYLRYNHADAEFQERLQEDTSFGGNLGRAVFQAKKRVLEPFGLVEEGAKTAPGKKRPVEQSPQEPDSSSGIGKTGQQPAKKRLNFGQTGDSESVPDPQPLGEPPATPAAVGPTTMASGGGAPMADNNEGADGVGNASGNWHCDSTWLGDRVITTSTRTWALPTYNNHLYKQISSASTGASNDNHYFGYSTPWGYFDFNRFHCHFSPRDWQRLINNNWGFRPKRLNFKLFNIQVKEVTTNDGVTTIANNLTSTVQVFSDSEYQLPYVLGSAHQGCLPPFPADVFMIPQYGYLTLNNGSQAVGRSSFYCLEYFPSQMLRTGNNFTFSYTFEDVPFHSSYAHSQSLDRLMNPLIDQYLYYLNRTQNQSGSAQNKDLLFSRGSPAGMSVQLKNWLPGPCYRQQRVSKTKTDNNNSNFTWTGASKYNLNGRESIINPGTAMASHKDDEDKFFPMSGVMIFGKESAGASNTALDNVMITDEEEIKATNPVATERFGTVAVNFQSSSTDPATGDVHVMGALPGMVWQDRDVYLQGPIWAKIPHTDGHFHPSPLMGGFGLKHPPPQILIKNTPVPANPPAEFSATKFASFITQYSTGQVSVEIEWELQKENSKRWNPEVQYTSNYAKSANVDFTVDNNGLYTEPRPIGTRYLTRPL

SEQ ID NO: 957 - protein, 736 aa, Artificial Sequence
  source: /note="Description of Artificial Sequence: Synthetic polypeptide"
MAADGYLPDWLEDNLSEGIREWWDLKPGAPKPKANQQKQDDGRGLVLPGYKYLGPFNGLDKGEPVNAADAAALEHDKAYDQQLKAGDNPYLRYNHADAEFQERLQEDTSFGGNLGRAVFQAKKRVLEPFGLVEEGAKTAPGKKRPVEQSPQEPDSSSGIGKSGQQPAKKRLNFGQTGDSESVPDPQPLGEPPATPAAVGPTTMASGGGAPMADNNEGADGVGNASGNWHCDSTWLGDRVITTSTRTWALPTYNNHLYKQISSASTGASNDNHYFGYSTPWGYFDFNRFHCHFSPRDWQRLINNNWGFRPKRLNFKLFNIQVKEVTTNDGVTTIANNLTSTVQVFSDSEYQLPYVLGSAHQGCLPPFPADVFMIPQYGYLTLNNGSQAVGRSSFYCLEYFPSQMLRTGNNFTFSYTFEDVPFHSSYAHSQSLDRLMNPLIDQYLYYLNRTQNQSGSAQNKDLLFSRGSPAGMSVQPKNWLPGPCYRQQRVSKTKTDNNNSNFTWTGASKYNLNGRESIINPGTAMASHKDDEDKFFPMSGVMIFGKGSAGASNTALDNVMITDEEEIKATNPVATERFGTVAVNFQSSSTDPATGDVHVMGALPGMVWQDRDVYLQGPIWAKIPHTDGHFHPSPLMGGFGLKHPPPQILIKNTPVPANPPAEFSATKFASFITQYSTGQVSVEIEWELQKENSKRWNPEVQYTSNYAKSANVDFTVDNNGLYTEPRPIGTRYLTRPL

SEQ ID NO: 958 - protein, 736 aa, Artificial Sequence; identical to SEQ ID NO: 699
  source: /note="Description of Artificial Sequence: Synthetic polypeptide"

SEQ ID NO: 959 - protein, 742 aa, Artificial Sequence
  source: /note="Description of Artificial Sequence: Synthetic polypeptide"
MAADGYLPDWLEDNLSEGIREWWALKPGAPQPKANQQHQDNGRGLVLPGYKYLGPFNGLDKGEPVNEADAAALEHDKAYDKQLEQGDNPYLKYNHADAEFQQRLATDTSFGGNLGRAVFQAKKRILEPLGLVEEGVKTAPGKKRPLEKTPNRPTNPDSGKAPAKKKQKDGEPADSARRTLDFEDSGAGDGPPEGSSSGEMSHDAEMRAAPGGNAVEAGQGADGVGNASGDWHCDSTWSEGRVTTTSTRTWVLPTYNNHLYLRIGTTANSNTYNGFSTPWGYFDFNRFHCHFSPRDWQRLINNNWGLRPKSMRVKIFNIQVKEVTTSNGETTVANNLTSTVQIFADSTYELPYVMDAGQEGSFPPFPNDVFMVPQYGYCGVVTGKNQNQTDRNAFYCLEYFPSQMLRTGNNFEVSYQFEKVPFHSMYAHSQSLDRMMNPLLDQYLWHLQSTTTGNSLNQGTATTTYGKITTGDFAYYRKNWLPGACIKQQKFSKNANQNYKIPASGGDALLKYDTHTTLNGRWSNMAPGPPMATAGAGDSDFSNSQLIFAGPNPSGNTTTSSNNLLFTSEEEIATTNPRDTDMFGQIADNNQNATTAPHIANLDAMGIVPGMVWQNRDIYYQGPIWAKVPHTDGHFHPSPLMGGFGLKHPPPQIFIKNTPVPANPNTTFSAARINSFLTQYSTGQVAVQIDWEIQKEHSKRWNPEVQFTSNYGTQNSMLWAPDNAGNYHELRAIGSRFLTHHL

SEQ ID NO: 960 - DNA, 2211 bp, Artificial Sequence
  source: /note="Description of Artificial Sequence: Synthetic polynucleotide"
atggctgccgatggttatcttccagattggctcgaggacaacctctctgagggcattcgcgagtggtgggacttgaaacctggagccccgaagcccaaagccaaccagcaaaagcaggacgacggccggggtctggtgcttcctggctacaagtacctcggacccttcaacggactcgacaagggggagcccgtcaacgcggcggacgcagcggccctcgagcacgacaaggcctacgaccagcagctcaaagcgggtgacaatccgtacctgcggtataaccacgccgacgccgagtttcaggagcgtctgcaagaagatacgtcttttgggggcaacctcgggcgagcagtcttccaggccaagaagcgggttctcgaacctctcggtctggttgaggaaggcgctaaggcggctcctggaaagaaacgtccggtagagcagtcgccacaagagccagactcctcctcgggcatcggcaagacaggccagcagcccgctaaaaagagactcaattttggtcagactggcgactcagagtcagtccccgatccacaacctctcggagaacctccagcagccccctcaggtctgggacctaatacaatggcttcaggcggtggcgctccaatggcagacaataacgaaggcgccgacggagtgggtaattcctcgggaaattggcattgcgattccacatggctgggggacagagtcatcaccaccagcacccgaacctgggccctgcccacctacaacaaccacctctacaagcaaatctccaacggcacctcgggaggaagcaccaacgacaacacctattttggctacagcaccccctgggggtattttgacttcaacagattccactgtcacttttcaccacgtgactggcaacgactcatcaacaacaattggggattccggcccaaaagactcaacttcaagctgttcaacatccaggtcaaggaagtcacgacgaacgaaggcaccaagaccatcgccaataatctcaccagcaccgtgcaggtctttacggactcggagtaccagttaccgtacgtgctaggatccgctcaccagggatgtctgcctccgttcccggcggacgtcttcatggttcctcagtacggctatttaactttaaacaatggaagccaagccctgggacgttcctccttctactgtctggagtatttcccatcgcagatgctgagaaccggcaacaactttcagttcagctacaccttcgaggacgtgcctttccacagcagctacgcgcacagccagagcctggacaggctgatgaatcccctcatcgaccagtacctgtactacctggtcagaacgcaaacgactggaactggagggacgcagactctggcattcagccaagcgggtcctagctcaatggccaaccaggctagaaattgggtgcccggaccttgctaccggcagcagcgcgtctccacgacaaccaaccagaacaacaacagcaactttgcctggacgggagctgccaagtttaagctgaacggccgagactctctaatgaatccgggcgtggcaatggcttcccacaaggatgacgacgaccgcttcttcccttcgagcggggtcctgatttttggcaagcaaggagccgggaacgatggagtggattacagccaagtgctgattacagatgaggaagaaatcaaggctaccaaccccgtggccacagaagaatatggagcagtggccatcaacaaccaggccgccaatacgcaggcgcagaccggactcgtgcacaaccagggggtgattcccggcatggtgtggcagaatagagacgtgtacctgcagggtcccatctgggccaaaattcctcacacggacggcaactttcacccgtctcccctgatgggcggctttggactgaagcacccgcctcctcaaattctcatcaagaacacaccggttccagcggacccgccgcttaccttcaaccaggccaagctgaactctttcatcacgcagtacagcaccggacaggtcagcgtggaaatcgagtgggagctgcagaaagaaaacagcaaacgctggaatccagagattcaatacacttccaactactacaaatctacaaatgtggactttgctgtcaacacggagggggtttatagcgagcctcgccccattggcacccgttacctcacccgcaacctgtaa

SEQ ID NO: 961 - DNA, 2592 bp, Artificial Sequence
  source: /note="Description of Artificial Sequence: Synthetic polynucleotide"
ctggctgccgatggttatcttccagattggctcgaggacaacctctctgagggcattcgcgagtggtgggacttgaaacctggagccccgaagcccaaagccaaccagcaaaagcaggacgacggccggggtctggtgcttcctggctacaagtacctcggacccttcaacggactcgacaagggggagcccgtcaacgcggcggacgcagcggccctcgagcacgacaaggcctacgaccagcagctcaaagcgggtgacaatccgtacctgcggtataaccacgccgacgccgagtttcaggagcgtctgcaagaagatacgtcttttgggggcaacctcgggcgagcagtcttccaggccaagaagcgggttctcgaacctctcggtctggttgaggaaggcgctaagatggaagtgcagctccaagccagtggtggcggactggtgcaggcaggaggcagcttgaggctcagctgtgccgccagcggcttcaagatcacccactacaccatgggctggttccggcaggcccctggcaaggagagggagttcgtgagcaggattacctggggtggtgacaacaccttctacagcaacagcgtgaagggcaggttcaccatcagcagggacaacgccaagaacaccgtgtacctgcagatgaacagcctgaagcccgaggacaccgccgactactactgtgcagccggcagtaccagcaccgctacccccctgagggtggactactggggcaaaggcactcaggtgacagtgtcttcaggagggggtggcagcgctcctggaaagaaacgtccggtagagcagtcgccacaagagccagactcctcctcgggcatcggcaagacaggccagcagcccgctaaaaagagactcaattttggtcagactggcgactcagagtcagtccccgatccacaacctctcggagaacctccagcagccccctcaggtctgggacctaatacaatggcttcaggcggtggcgctccaatggcagacaataacgaaggcgccgacggagtgggtaattcctcgggaaattggcattgcgattccacatggctgggggacagagtcatcaccaccagcacccgaacctgggccctgcccacctacaacaaccacctctacaagcaaatctccaacggcacctcgggaggaagcaccaacgacaacacctattttggctacagcaccccctgggggtattttgacttcaacagattccactgtcacttttcaccacgtgactggcaacgactcatcaacaacaattggggattccggcccaaaagactcaacttcaagctgttcaacatccaggtcaaggaagtcacgacgaacgaaggcaccaagaccatcgccaataatctcaccagcaccgtgcaggtctttacggactcggagtaccagttaccgtacgtgctaggatccgctcaccagggatgtctgcctccgttcccggcggacgtcttcatggttcctcagtacggctatttaactttaaacaatggaagccaagccctgggacgttcctccttctactgtctggagtatttcccatcgcagatgctgagaaccggcaacaactttcagttcagctacaccttcgaggacgtgcctttccacagcagctacgcgcacagccagagcctggacaggctgatgaatcccctcatcgaccagtacctgtactacctggtcagaacgcaaacgactggaactggagggacgcagactctggcattcagccaagcgggtcctagctcaatggccaaccaggctagaaattgggtgcccggaccttgctaccggcagcagcgcgtctccacgacaaccaaccagaacaacaacagcaactttgcctggacgggagctgccaagtttaagctgaacggccgagactctctaatgaatccgggcgtggcaatggcttcccacaaggatgacgacgaccgcttcttcccttcgagcggggtcctgatttttggcaagcaaggagccgggaacgatggagtggattacagccaagtgctgattacagatgaggaagaaatcaaggctaccaaccccgtggccacagaagaatatggagcagtggccatcaacaaccaggccgccaatacgcaggcgcagaccggactcgtgcacaaccagggggtgattcccggcatggtgtggcagaatagagacgtgtacctgcagggtcccatctgggccaaaattcctcacacggacggcaactttcacccgtctcccctgatgggcggctttggactgaagcacccgcctcctcaaattctcatcaagaacacaccggttccagcggacccgccgcttaccttcaaccaggccaagctgaactctttcatcacgcagtacagcaccggacaggtcagcgtggaaatcgagtgggagctgcagaaagaaaacagcaaacgctggaatccagagattcaatacacttccaactactacaaatctacaaatgtggactttgctgtcaacacggagggggtttatagcgagcctcgccccattggcacccgttacctcacccgcaacctgtaa

SEQ ID NO: 962 - DNA, 2601 bp, Artificial Sequence
  source: /note="Description of Artificial Sequence: Synthetic polynucleotide"
ctggctgccgatggttatcttccagattggctcgaggacaacctctctgagggcattcgcgagtggtgggacttgaaacctggagccccgaagcccaaagccaaccagcaaaagcaggacgacggccggggtctggtgcttcctggctacaagtacctcggacccttcaacggactcgacaagggggagcccgtcaacgcggcggacgcagcggccctcgagcacgacaaggcctacgaccagcagctcaaagcgggtgacaatccgtacctgcggtataaccacgccgacgccgagtttcaggagcgtctgcaagaagatacgtcttttgggggcaacctcgggcgagcagtcttccaggccaagaagcgggttctcgaacctctcggtctggttgaggaaggcgctaagatggaggtgcagctgcaggcttctggaggaggactggtgcaggctggagggagtctgaggctgtcttgcagtgcctcagtgaggactttctccatctacgccatgggctggtttaggcaggctcccgggaaggagcgcgaattcgtggccggaatcaaccggtctggcgacgtgaccaagtacgctgatttcgtgaaaggccggtttagcatttccagagacaacgccaagaatatggtgtatctgcagatgaactccctgaaacctgaagacacagctctgtactattgtgccgctacttgggcctacgataccgtgggggctctgacatcaggatataatttttggggccaggggacccaggtgacagtgagctccggaggaggaggaagcgctcctggaaagaaacgtccggtagagcagtcgccacaagagccagactcctcctcgggcatcggcaagacaggccagcagcccgctaaaaagagactcaattttggtcagactggcgactcagagtcagtccccgatccacaacctctcggagaacctccagcagccccctcaggtctgggacctaatacaatggcttcaggcggtggcgctccaatggcagacaataacgaaggcgccgacggagtgggtaattcctcgggaaattggcattgcgattccacatggctgggggacagagtcatcaccaccagcacccgaacctgggccctgcccacctacaacaaccacctctacaagcaaatctccaacggcacctcgggaggaagcaccaacgacaacacctattttggctacagcaccccctgggggtattttgacttcaacagattccactgtcacttttcaccacgtgactggcaacgactcatcaacaacaattggggattccggcccaaaagactcaacttcaagctgttcaacatccaggtcaaggaagtcacgacgaacgaaggcaccaagaccatcgccaataatctcaccagcaccgtgcaggtctttacggactcggagtaccagttaccgtacgtgctaggatccgctcaccagggatgtctgcctccgttcccggcggacgtcttcatggttcctcagtacggctatttaactttaaacaatggaagccaagccctgggacgttcctccttctactgtctggagtatttcccatcgcagatgctgagaaccggcaacaactttcagttcagctacaccttcgaggacgtgcctttccacagcagctacgcgcacagccagagcctggacaggctgatgaatcccctcatcgaccagtacctgtactacctggtcagaacgcaaacgactggaactggagggacgcagactctggcattcagccaagcgggtcctagctcaatggccaaccaggctagaaattgggtgcccggaccttgctaccggcagcagcgcgtctccacgacaaccaaccagaacaacaacagcaactttgcctggacgggagctgccaagtttaagctgaacggccgagactctctaatgaatccgggcgtggcaatggcttcccacaaggatgacgacgaccgcttcttcccttcgagcggggtcctgatttttggcaagcaaggagccgggaacgatggagtggattacagccaagtgctgattacagatgaggaagaaatcaaggctaccaaccccgtggccacagaagaatatggagcagtggccatcaacaaccaggccgccaatacgcaggcgcagaccggactcgtgcacaaccagggggtgattcccggcatggtgtggcagaatagagacgtgtacctgcagggtcccatctgggccaaaattcctcacacggacggcaactttcacccgtctcccctgatgggcggctttggactgaagcacccgcctcctcaaattctcatcaagaacacaccggttccagcggacccgccgcttaccttcaaccaggccaagctgaactctttcatcacgcagtacagcaccggacaggtcagcgtggaaatcgagtgggagctgcagaaagaaaacagcaaacgctggaatccagagattcaatacacttccaactactacaaatctacaaatgtggactttgctgtcaacacggagggggtttatagcgagcctcgccccattggcacccgttacctcacccgcaacctgtaa

SEQ ID NO: 963 - DNA, 2367 bp, Artificial Sequence
  source: /note="Description of Artificial Sequence: Synthetic polynucleotide"
ctggctgccgatggttatcttccagattggctcgaggacaacctctctgagggcattcgcgagtggtgggacttgaaacctggagccccgaagcccaaagccaaccagcaaaagcaggacgacggccggggtctggtgcttcctggctacaagtacctcggacccttcaacggactcgacaagggggagcccgtcaacgcggcggacgcagcggccctcgagcacgacaaggcctacgaccagcagctcaaagcgggtgacaatccgtacctgcggtataaccacgccgacgccgagtttcaggagcgtctgcaagaagatacgtcttttgggggcaacctcgggcgagcagtcttccaggccaagaagcgggttctcgaacctctcggtctggttgaggaaggcgctaagatgccaagcagtgtaatcgatgcgctgcagtacaagctggagggcaccacgaggctgaccaggaagaggggtctgaagctggccacggccctcagccttagcaataagttcgtagagggcagccccagcggcggcggcggcagcggcggcggcggcagcgctcctggaaagaaacgtccggtagagcagtcgccacaagagccagactcctcctcgggcatcggcaagacaggccagcagcccgctaaaaagagactcaattttggtcagactggcgactcagagtcagtccccgatccacaacctctcggagaacctccagcagccccctcaggtctgggacctaatacaatggcttcaggcggtggcgctccaatggcagacaataacgaaggcgccgacggagtgggtaattcctcgggaaattggcattgcgattccacatggctgggggacagagtcatcaccaccagcacccgaacctgggccctgcccacctacaacaaccacctctacaagcaaatctccaacggcacctcgggaggaagcaccaacgacaacacctattttggctacagcaccccctgggggtattttgacttcaacagattccactgtcacttttcaccacgtgactggcaacgactcatcaacaacaattggggattccggcccaaaagactcaacttcaagctgttcaacatccaggtcaaggaagtcacgacgaacgaaggcaccaagaccatcgccaataatctcaccagcaccgtgcaggtctttacggactcggagtaccagttaccgtacgtgctaggatccgctcaccagggatgtctgcctccgttcccggcggacgtcttcatggttcctcagtacggctatttaactttaaacaatggaagccaagccctgggacgttcctccttctactgtctggagtatttcccatcgcagatgctgagaaccggcaacaactttcagttcagctacaccttcgaggacgtgcctttccacagcagctacgcgcacagccagagcctggacaggctgatgaatcccctcatcgaccagtacctgtactacctggtcagaacgcaaacgactggaactggagggacgcagactctggcattcagccaagcgggtcctagctcaatggccaaccaggctagaaattgggtgcccggaccttgctaccggcagcagcgcgtctccacgacaaccaaccagaacaacaacagcaactttgcctggacgggagctgccaagtttaagctgaacggccgagactctctaatgaatccgggcgtggcaatggcttcccacaaggatgacgacgaccgcttcttcccttcgagcggggtcctgatttttggcaagcaaggagccgggaacgatggagtggattacagccaagtgctgattacagatgaggaagaaatcaaggctaccaaccccgtggccacagaagaatatggagcagtggccatcaacaaccaggccgccaatacgcaggcgcagaccggactcgtgcacaaccagggggtgattcccggcatggtgtggcagaatagagacgtgtacctgcagggtcccatctgggccaaaattcctcacacggacggcaactttcacccgtctcccctgatgggcggctttggactgaagcacccgcctcctcaaattctcatcaagaacacaccggttccagcggacccgccgcttaccttcaaccaggccaagctgaactctttcatcacgcagtacagcaccggacaggtcagcgtggaaatcgagtgggagctgcagaaagaaaacagcaaacgctggaatccagagattcaatacacttccaactactacaaatctacaaatgtggactttgctgtcaacacggagggggtttatagcgagcctcgccccattggcacccgttacctcacccgcaacctgtaa

SEQ ID NO: 964 - DNA, 2328 bp, Artificial Sequence
  source: /note="Description of Artificial Sequence: Synthetic polynucleotide"
ctggctgccgatggttatcttccagattggctcgaggacaacctctctgagggcattcgcgagtggtgggacttgaaacctggagccccgaagcccaaagccaaccagcaaaagcaggacgacggccggggtctggtgcttcctggctacaagtacctcggacccttcaacggactcgacaagggggagcccgtcaacgcggcggacgcagcggccctcgagcacgacaaggcctacgaccagcagctcaaagcgggtgacaatccgtacctgcggtataaccacgccgacgccgagtttcaggagcgtctgcaagaagatacgtcttttgggggcaacctcgggcgagcagtcttccaggccaagaagcgggttctcgaacctctcggtctggttgaggaaggcgctaagatgtataccatctggatgcccgagaaccccaggcccggtaccccctgcgacatcttcaccaacagcaggggcaagcgagccagcaacggcggcggcggcggcagcggcggcggcggcagcgctcctggaaagaaacgtccggtagagcagtcgccacaagagccagactcctcctcgggcatcggcaagacaggccagcagcccgctaaaaagagactcaattttggtcagactggcgactcagagtcagtccccgatccacaacctctcggagaacctccagcagccccctcaggtctgggacctaatacaatggcttcaggcggtggcgctccaatggcagacaataacgaaggcgccgacggagtgggtaattcctcgggaaattggcattgcgattccacatggctgggggacagagtcatcaccaccagcacccgaacctgggccctgcccacctacaacaaccacctctacaagcaaatctccaacggcacctcgggaggaagcaccaacgacaacacctattttggctacagcaccccctgggggtattttgacttcaacagattccactgtcacttttcaccacgtgactggcaacgactcatcaacaacaattggggattccggcccaaaagactcaacttcaagctgttcaacatccaggtcaaggaagtcacgacgaacgaaggcaccaagaccatcgccaataatctcaccagcaccgtgcaggtctttacggactcggagtaccagttaccgtacgtgctaggatccgctcaccagggatgtctgcctccgttcccggcggacgtcttcatggttcctcagtacggctatttaactttaaacaatggaagccaagccctgggacgttcctccttctactgtctggagtatttcccatcgcagatgctgagaaccggcaacaactttcagttcagctacaccttcgaggacgtgcctttccacagcagctacgcgcacagccagagcctggacaggctgatgaatcccctcatcgaccagtacctgtactacctggtcagaacgcaaacgactggaactggagggacgcagactctggcattcagccaagcgggtcctagctcaatggccaaccaggctagaaattgggtgcccggaccttgctaccggcagcagcgcgtctccacgacaaccaaccagaacaacaacagcaactttgcctggacgggagctgccaagtttaagctgaacggccgagactctctaatgaatccgggcgtggcaatggcttcccacaaggatgacgacgaccgcttcttcccttcgagcggggtcctgatttttggcaagcaaggagccgggaacgatggagtggattacagccaagtgctgattacagatgaggaagaaatcaaggctaccaaccccgtggccacagaagaatatggagcagtggccatcaacaaccaggccgccaatacgcaggcgcagaccggactcgtgcacaaccagggggtgattcccggcatggtgtggcagaatagagacgtgtacctgcagggtcccatctgggccaaaattcctcacacggacggcaactttcacccgtctcccctgatgggcggctttggactgaagcacccgcctcctcaaattctcatcaagaacacaccggttccagcggacccgccgcttaccttcaaccaggccaagctgaactctttcatcacgcagtacagcaccggacaggtcagcgtggaaatcgagtgggagctgcagaaagaaaacagcaaacgctggaatccagagattcaatacacttccaactactacaaatctacaaatgtggactttgctgtcaacacggagggggtttatagcgagcctcgccccattggcacccgttacctcacccgcaacctgtaa

SEQ ID NO: 965 - DNA, 2298 bp, Artificial Sequence
  source: /note="Description of Artificial Sequence: Synthetic polynucleotide"
ctggctgccgatggttatcttccagattggctcgaggacaacctctctgagggcattcgcgagtggtgggacttgaaacctggagccccgaagcccaaagccaaccagcaaaagcaggacgacggccggggtctggtgcttcctggctacaagtacctcggacccttcaacggactcgacaagggggagcccgtcaacgcggcggacgcagcggccctcgagcacgacaaggcctacgaccagcagctcaaagcgggtgacaatccgtacctgcggtataaccacgccgacgccgagtttcaggagcgtctgcaagaagatacgtcttttgggggcaacctcgggcgagcagtcttccaggccaagaagcgggttctcgaacctctcggtctggttgaggaaggcgctaagatgaccttcttctacggcggcagcaggggcaagaggaacaacttcaagaccgaggagtacggcggcggcggcagcggcggcggcggcagcgctcctggaaagaaacgtccggtagagcagtcgccacaagagccagactcctcctcgggcatcggcaagacaggccagcagcccgctaaaaagagactcaattttggtcagactggcgactcagagtcagtccccgatccacaacctctcggagaacctccagcagccccctcaggtctgggacctaatacaatggcttcaggcggtggcgctccaatggcagacaataacgaaggcgccgacggagtgggtaattcctcgggaaattggcattgcgattccacatggctgggggacagagtcatcaccaccagcacccgaacctgggccctgcccacctacaacaaccacctctacaagcaaatctccaacggcacctcgggaggaagcaccaacgacaacacctattttggctacagcaccccctgggggtattttgacttcaacagattccactgtcacttttcaccacgtgactggcaacgactcatcaacaacaattggggattccggcccaaaagactcaacttcaagctgttcaacatccaggtcaaggaagtcacgacgaacgaaggcaccaagaccatcgccaataatctcaccagcaccgtgcaggtctttacggactcggagtaccagttaccgtacgtgctaggatccgctcaccagggatgtctgcctccgttcccggcggacgtcttcatggttcctcagtacggctatttaactttaaacaatggaagccaagccctgggacgttcctccttctactgtctggagtatttcccatcgcagatgctgagaaccggcaacaactttcagttcagctacaccttcgaggacgtgcctttccacagcagctacgcgcacagccagagcctggacaggctgatgaatcccctcatcgaccagtacctgtactacctggtcagaacgcaaacgactggaactggagggacgcagactctggcattcagccaagcgggtcctagctcaatggccaaccaggctagaaattgggtgcccggaccttgctaccggcagcagcgcgtctccacgacaaccaaccagaacaacaacagcaactttgcctggacgggagctgccaagtttaagctgaacggccgagactctctaatgaatccgggcgtggcaatggcttcccacaaggatgacgacgaccgcttcttcccttcgagcggggtcctgatttttggcaagcaaggagccgggaacgatggagtggattacagccaagtgctgattacagatgaggaagaaatcaaggctaccaaccccgtggccacagaagaatatggagcagtggccatcaacaaccaggccgccaatacgcaggcgcagaccggactcgtgcacaaccagggggtgattcccggcatggtgtggcagaatagagacgtgtacctgcagggtcccatctgggccaaaattcctcacacggacggcaactttcacccgtctcccctgatgggcggctttggactgaagcacccgcctcctcaaattctcatcaagaacacaccggttccagcggacccgccgcttaccttcaaccaggccaagctgaactctttcatcacgcagtacagcaccggacaggtcagcgtggaaatcgagtgggagctgcagaaagaaaacagcaaacgctggaatccagagattcaatacacttccaactactacaaatctacaaatgtggactttgctgtcaacacggagggggtttatagcgagcctcgccccattggcacccgttacctcacccgcaacctgtaa

SEQ ID NO: 966 - DNA, 2211 bp, Artificial Sequence
  source: /note="Description of Artificial Sequence: Synthetic polynucleotide"
atggctgccgatggttatcttccagattggctcgaggacaaccttagtgaaggaattcgcgagtggtgggctttgaaacctggagcccctcaacccaaggcaaatcaacaacatcaagacaacgctcgaggtcttgtgcttccgggttacaaataccttggacccggcaacggactcgacaagggggagccggtcaacgcagcagacgcggcggccctcgagcacgacaaggcctacgaccagcagctcaaggccggagacaacccgtacctcaagtacaaccacgccgacgccgagttccaggagcggctcaaagaagatacgtcttttgggggcaacctcgggcgagcagtcttccaggccaaaaagaggcttcttgaacctcttggtctggttgaggaagcggctaaggcggctcctggaaagaagaggcctgtagagcagtctcctcaggaaccggactcctccgcgggtattggcaaatcgggtgcacagcccgctaaaaagagactcaatttcggtcagactggcgacacagagtcagtcccagaccctcaaccaatcggagaacctcccgcagccccctcaggtgtgggatctcttacaatggcttcaggtggtggcgcaccagtggcagacaataacgaaggtgccgatggagtgggtagttcctcgggaaattggcattgcgattcccaatggctgggggacagagtcatcaccaccagcacccgaacctgggccctgcccacctacaacaatcacctctacaagcaaatctccaacagcacatctggaggatcttcaaatgacaacgcctacttcggctacagcaccccctgggggtattttgacttcaacagattccactgccacttctcaccacgtgactggcagcgactcatcaacaacaactggggattccggcctaagcgactcaacttcaagctcttcaacattcaggtcaaagaggttacggacaacaatggagtcaagaccatcgccaataaccttaccagcacggtccaggtcttcacggactcagactatcagctcccgtacgtgctcgggtcggctcacgagggctgcctcccgccgttcccagcggacgttttcatgattcctcagtacgggtatctgacgcttaatgatggaagccaggccgtgggtcgttcgtccttttactgcctggaatatttcccgtcgcaaatgctaagaacgggtaacaacttccagttcaactacgagtttgagaacgtacctttccatagcagctacgctcacagccaaagcctggaccgactaatgaatccactcatcgaccaatacttgtactatctctcaaagactattaacgattctggacagaatcaacaaacgctaaaattcagtgtggccggacccagcaacatggctgtccagggaagaaactacatacctggacccagctaccgacaacaacgtgtctcaaccactgtgactcaaaacaacaacagcgaatttgcttggcctggagcttcttcttgggctctcaatggacgtaatagcttgatgaatcctggacctgctatggccagccacaaagaaggagaggaccgtttctttcctttgtctggatctttaatttttggcaaacaaggaactggaagagacaacgtggatgcggacgaagtcatgataaccaacgaagaagaaattaaaactactaacccggtagcaacggagtcctatggacaagtggccataaaccaccagagtgcccaagcacaggcgcagaccggctgggttcaaaaccaaggaatacttccgggtatggtttggcaggacagagatgtgtacctgcaaggacccatttgggccaaaattcctcacacggacggcaactttcacccttctccgctgatgggagggtttggaatgaagcacccgcctcctcagatcctcatcaaaaacacacctgtacctgcggatcctccaacggccttcaacaaggacaagctgaactctttcatcacccagtattctactggccaagtcagcgtggagatcgagtgggagctgcagaaggaaaacagcaagcgctggaacccggagatccagtacacttccaactattacaagtctaataatgttgaatttgctgttaatactgaaggtgtatatagtgaaccccgccccattggcaccagatacctgactcgtaatctgtaa

SEQ ID NO: 967 - DNA, 2277 bp, Artificial Sequence
  source: /note="Description of Artificial Sequence: Synthetic polynucleotide"
ctggctgccgatggttatcttccagattggctcgaggacaaccttagtgaaggaattcgcgagtggtgggctttgaaacctggagcccctcaacccaaggcaaatcaacaacatcaagacaacgctcgaggtcttgtgcttccgggttacaaataccttggacccggcaacggactcgacaagggggagccggtcaacgcagcagacgcggcggccctcgagcacgacaaggcctacgaccagcagctcaaggccggagacaacccgtacctcaagtacaaccacgccgacgccgagttccaggagcggctcaaagaagatacgtcttttgggggcaacctcgggcgagcagtcttccaggccaaaaagaggcttcttgaacctcttggtctggttgaggaagcggctaagatgaacaaccagaagatcgtgaacctgaaggagaaggtggcccagctggaggccggcggcggcggcagcgctcctggaaagaagaggcctgtagagcagtctcctcaggaaccggactcctccgcgggtattggcaaatcgggtgcacagcccgctaaaaagagactcaatttcggtcagactggcgacacagagtcagtcccagaccctcaaccaatcggagaacctcccgcagccccctcaggtgtgggatctcttacaatggcttcaggtggtggcgcaccagtggcagacaataacgaaggtgccgatggagtgggtagttcctcgggaaattggcattgcgattcccaatggctgggggacagagtcatcaccaccagcacccgaacctgggccctgcccacctacaacaatcacctctacaagcaaatctccaacagcacatctggaggatcttcaaatgacaacgcctacttcggctacagcaccccctgggggtattttgacttcaacagattccactgccacttctcaccacgtgactggcagcgactcatcaacaacaactggggattccggcctaagcgactcaacttcaagctcttcaacattcaggtcaaagaggttacggacaacaatggagtcaagaccatcgccaataaccttaccagcacggtccaggtcttcacggactcagactatcagctcccgtacgtgctcgggtcggctcacgagggctgcctcccgccgttcccagcggacgttttcatgattcctcagtacgggtatctgacgcttaatgatggaagccaggccgtgggtcgttcgtccttttactgcctggaatatttcccgtcgcaaatgctaagaacgggtaacaacttccagttcaactacgagtttgagaacgtacctttccatagcagctacgctcacagccaaagcctggaccgactaatgaatccactcatcgaccaatacttgtactatctctcaaagactattaacgattctggacagaatcaacaaacgctaaaattcagtgtggccggacccagcaacatggctgtccagggaagaaactacatacctggacccagctaccgacaacaacgtgtctcaaccactgtgactcaaaacaacaacagcgaatttgcttggcctggagcttcttcttgggctctcaatggacgtaatagcttgatgaatcctggacctgctatggccagccacaaagaaggagaggaccgtttctttcctttgtctggatctttaatttttggcaaacaaggaactggaagagacaacgtggatgcggacgaagtcatgataaccaacgaagaagaaattaaaactactaacccggtagcaacggagtcctatggacaagtggccataaaccaccagagtgcccaagcacaggcgcagaccggctgggttcaaaaccaaggaatacttccgggtatggtttggcaggacagagatgtgtacctgcaaggacccatttgggccaaaattcctcacacggacggcaactttcacccttctccgctgatgggagggtttggaatgaagcacccgcctcctcagatcctcatcaaaaacacacctgtacctgcggatcctccaacggccttcaacaaggacaagctgaactctttcatcacccagtattctactggccaagtcagcgtggagatcgagtgggagctgcagaaggaaaacagcaagcgctggaacccggagatccagtacacttccaactattacaagtctaataatgttgaatttgctgttaatactgaaggtgtatatagtgaaccccgccccattggcaccagatacctgactcgtaatctgtaa

SEQ ID NO: 968 - DNA, 2313 bp, Artificial Sequence
  source: /note="Description of Artificial Sequence: Synthetic polynucleotide"
ctggctgccgatggttatcttccagattggctcgaggacaaccttagtgaaggaattcgcgagtggtgggctttgaaacctggagcccctcaacccaaggcaaatcaacaacatcaagacaacgctcgaggtcttgtgcttccgggttacaaataccttggacccggcaacggactcgacaagggggagccggtcaacgcagcagacgcggcggccctcgagcacgacaaggcctacgaccagcagctcaaggccggagacaacccgtacctcaagtacaaccacgccgacgccgagttccaggagcggctcaaagaagatacgtcttttgggggcaacctcgggcgagcagtcttccaggccaaaaagaggcttcttgaacctcttggtctggttgaggaagcggctaagatgtataccatctggatgcccgagaaccccaggcccggtaccccctgcgacatcttcaccaacagcaggggcaagcgagccagcaacggcggcggcggcggcagcgctcctggaaagaagaggcctgtagagcagtctcctcaggaaccggactcctccgcgggtattggcaaatcgggtgcacagcccgctaaaaagagactcaatttcggtcagactggcgacacagagtcagtcccagaccctcaaccaatcggagaacctcccgcagccccctcaggtgtgggatctcttacaatggcttcaggtggtggcgcaccagtggcagacaataacgaaggtgccgatggagtgggtagttcctcgggaaattggcattgcgattcccaatggctgggggacagagtcatcaccaccagcacccgaacctgggccctgcccacctacaacaatcacctctacaagcaaatctccaacagcacatctggaggatcttcaaatgacaacgcctacttcggctacagcaccccctgggggtattttgacttcaacagattccactgccacttctcaccacgtgactggcagcgactcatcaacaacaactggggattccggcctaagcgactcaacttcaagctcttcaacattcaggtcaaagaggttacggacaacaatggagtcaagaccatcgccaataaccttaccagcacggtccaggtcttcacggactcagactatcagctcccgtacgtgctcgggtcggctcacgagggctgcctcccgccgttcccagcggacgttttcatgattcctcagtacgggtatctgacgcttaatgatggaagccaggccgtgggtcgttcgtccttttactgcctggaatatttcccgtcgcaaatgctaagaacgggtaacaacttccagttcaactacgagtttgagaacgtacctttccatagcagctacgctcacagccaaagcctggaccgactaatgaatccactcatcgaccaatacttgtactatctctcaaagactattaacgattctggacagaatcaacaaacgctaaaattcagtgtggccggacccagcaacatggctgtccagggaagaaactacatacctggacccagctaccgacaacaacgtgtctcaaccactgtgactcaaaacaacaacagcgaatttgcttggcctggagcttcttcttgggctctcaatggacgtaatagcttgatgaatcctggacctgctatggccagccacaaagaaggagaggaccgtttctttcctttgtctggatctttaatttttggcaaacaaggaactggaagagacaacgtggatgcggacgaagtcatgataaccaacgaagaagaaattaaaactactaacccggtagcaacggagtcctatggacaagtggccataaaccaccagagtgcccaagcacaggcgcagaccggctgggttcaaaaccaaggaatacttccgggtatggtttggcaggacagagatgtgtacctgcaaggacccatttgggccaaaattcctcacacggacggcaactttcacccttctccgctgatgggagggtttggaatgaagcacccgcctcctcagatcctcatcaaaaacacacctgtacctgcggatcctccaacggccttcaacaaggacaagctgaactctttcatcacccagtattctactggccaagtcagcgtggagatcgagtgggagctgcagaaggaaaacagcaagcgctggaacccggagatccagtacacttccaactattacaagtctaataatgttgaatttgctgttaatactgaaggtgtatatagtgaaccccgccccattggcaccagatacctgactcgtaatctgtaa

SEQ ID NO: 969 - DNA, 2283 bp, Artificial Sequence
  source: /note="Description of Artificial Sequence: Synthetic polynucleotide"
ctggctgccgatggttatcttccagattggctcgaggacaaccttagtgaaggaattcgcgagtggtgggctttgaaacctggagcccctcaacccaaggcaaatcaacaacatcaagacaacgctcgaggtcttgtgcttccgggttacaaataccttggacccggcaacggactcgacaagggggagccggtcaacgcagcagacgcggcggccctcgagcacgacaaggcctacgaccagcagctcaaggccggagacaacccgtacctcaagtacaaccacgccgacgccgagttccaggagcggctcaaagaagatacgtcttttgggggcaacctcgggcgagcagtcttccaggccaaaaagaggcttcttgaacctcttggtctggttgaggaagcggctaagatgaccttcttctacggcggcagcaggggcaagaggaacaacttcaagaccgaggagtacggcggcggcggcagcgctcctggaaagaagaggcctgtagagcagtctcctcaggaaccggactcctccgcgggtattggcaaatcgggtgcacagcccgctaaaaagagactcaatttcggtcagactggcgacacagagtcagtcccagaccctcaaccaatcggagaacctcccgcagccccctcaggtgtgggatctcttacaatggcttcaggtggtggcgcaccagtggcagacaataacgaaggtgccgatggagtgggtagttcctcgggaaattggcattgcgattcccaatggctgggggacagagtcatcaccaccagcacccgaacctgggccctgcccacctacaacaatcacctctacaagcaaatctccaacagcacatctggaggatcttcaaatgacaacgcctacttcggctacagcaccccctgggggtattttgacttcaacagattccactgccacttctcaccacgtgactggcagcgactcatcaacaacaactggggattccggcctaagcgactcaacttcaagctcttcaacattcaggtcaaagaggttacggacaacaatggagtcaagaccatcgccaataaccttaccagcacggtccaggtcttcacggactcagactatcagctcccgtacgtgctcgggtcggctcacgagggctgcctcccgccgttcccagcggacgttttcatgattcctcagtacgggtatctgacgcttaatgatggaagccaggccgtgggtcgttcgtccttttactgcctggaatatttcccgtcgcaaatgctaagaacgggtaacaacttccagttcaactacgagtttgagaacgtacctttccatagcagctacgctcacagccaaagcctggaccgactaatgaatccactcatcgaccaatacttgtactatctctcaaagactattaacgattctggacagaatcaacaaacgctaaaattcagtgtggccggacccagcaacatggctgtccagggaagaaactacatacctggacccagctaccgacaacaacgtgtctcaaccactgtgactcaaaacaacaacagcgaatttgcttggcctggagcttcttcttgggctctcaatggacgtaatagcttgatgaatcctggacctgctatggccagccacaaagaaggagaggaccgtttctttcctttgtctggatctttaatttttggcaaacaaggaactggaagagacaacgtggatgcggacgaagtcatgataaccaacgaagaagaaattaaaactactaacccggtagcaacggagtcctatggacaagtggccataaaccaccagagtgcccaagcacaggcgcagaccggctgggttcaaaaccaaggaatacttccgggtatggtttggcaggacagagatgtgtacctgcaaggacccatttgggccaaaattcctcacacggacggcaactttcacccttctccgctgatgggagggtttggaatgaagcacccgcctcctcagatcctcatcaaaaacacacctgtacctgcggatcctccaacggccttcaacaaggacaagctgaactctttcatcacccagtattctactggccaagtcagcgtggagatcgagtgggagctgcagaaggaaaacagcaagcgctggaacccggagatccagtacacttccaactattacaagtctaataatgttgaatttgctgttaatactgaaggtgtatatagtgaaccccgccccattggcaccagatacctgactcgtaatctgtaa

SEQ ID NO: 970 - DNA, 2283 bp, Artificial Sequence
  source: /note="Description of Artificial Sequence: Synthetic polynucleotide"
ctggctgccgatggttatcttccagattggctcgaggacaaccttagtgaaggaattcgcgagtggtgggctttgaaacctggagcccctcaacccaaggcaaatcaacaacatcaagacaacgctcgaggtcttgtgcttccgggttacaaataccttggacccggcaacggactcgacaagggggagccggtcaacgcagcagacgcggcggccctcgagcacgacaaggcctacgaccagcagctcaaggccggagacaacccgtacctcaagtacaaccacgccgacgccgagttccaggagcggctcaaagaagatacgtcttttgggggcaacctcgggcgagcagtcttccaggccaaaaagaggcttcttgaacctcttggtctggttgaggaagcggctaagatggcagctgcggccgccgcggctgcagcggctgcagccgccgcagctgcggctgcagcgggcggcggcggcagcgctcctggaaagaagaggcctgtagagcagtctcctcaggaaccggactcctccgcgggtattggcaaatcgggtgcacagcccgctaaaaagagactcaatttcggtcagactggcgacacagagtcagtcccagaccctcaaccaatcggagaacctcccgcagccccctcaggtgtgggatctcttacaatggcttcaggtggtggcgcaccagtggcagacaataacgaaggtgccgatggagtgggtagttcctcgggaaattggcattgcgattcccaatggctgggggacagagtcatcaccaccagcacccgaacctgggccctgcccacctacaacaatcacctctacaagcaaatctccaacagcacatctggaggatcttcaaatgacaacgcctacttcggctacagcaccccctgggggtattttgacttcaacagattccactgccacttctcaccacgtgactggcagcgactcatcaacaacaactggggattccggcctaagcgactcaacttcaagctcttcaacattcaggtcaaagaggttacggacaacaatggagtcaagaccatcgccaataaccttaccagcacggtccaggtcttcacggactcagactatcagctcccgtacgtgctcgggtcggctcacgagggctgcctcccgccgttcccagcggacgttttcatgattcctcagtacgggtatctgacgcttaatgatggaagccaggccgtgggtcgttcgtccttttactgcctggaatatttcccgtcgcaaatgctaagaacgggtaacaacttccagttcaactacgagtttgagaacgtacctttccatagcagctacgctcacagccaaagcctggaccgactaatgaatccactcatcgaccaatacttgtactatctctcaaagactattaacgattctggacagaatcaacaaacgctaaaattcagtgtggccggacccagcaacatggctgtccagggaagaaactacatacctggacccagctaccgacaacaacgtgtctcaaccactgtgactcaaaacaacaacagcgaatttgcttggcctggagcttcttcttgggctctcaatggacgtaatagcttgatgaatcctggacctgctatggccagccacaaagaaggagaggaccgtttctttcctttgtctggatctttaatttttggcaaacaaggaactggaagagacaacgtggatgcggacgaagtcatgataaccaacgaagaagaaattaaaactactaacccggtagcaacggagtcctatggacaagtggccataaaccaccagagtgcccaagcacaggcgcagaccggctgggttcaaaaccaaggaatacttccgggtatggtttggcaggacagagatgtgtacctgcaaggacccatttgggccaaaattcctcacacggacggcaactttcacccttctccgctgatgggagggtttggaatgaagcacccgcctcctcagatcctcatcaaaaacacacctgtacctgcggatcctccaacggccttcaacaaggacaagctgaactctttcatcacccagtattctactggccaagtcagcgtggagatcgagtgggagctgcagaaggaaaacagcaagcgctggaacccggagatccagtacacttccaactattacaagtctaataatgttgaatttgctgttaatactgaaggtgtatatagtgaaccccgccccattggcaccagatacctgactcgtaatctgtaa

SEQ ID NO: 971 - protein, 726 aa, Artificial Sequence
  source: /note="Description of Artificial Sequence: Synthetic polypeptide"
MEVQLQASGGGLVQAGGSLRLSCAASGFKITHYTMGWFRQAPGKEREFVSRITWGGDNTFYSNSVKGRFTISRDNAKNTVYLQMNSLKPEDTADYYCAAGSTSTATPLRVDYWGKGTQVTVSSGGGGSAPGKKRPVEQSPQEPDSSSGIGKTGQQPAKKRLNFGQTGDSESVPDPQPLGEPPAAPSGLGPNTMASGGGAPMADNNEGADGVGNSSGNWHCDSTWLGDRVITTSTRTWALPTYNNHLYKQISNGTSGGSTNDNTYFGYSTPWGYFDFNRFHCHFSPRDWQRLINNNWGFRPKRLNFKLFNIQVKEVTTNEGTKTIANNLTSTVQVFTDSEYQLPYVLGSAHQGCLPPFPADVFMVPQYGYLTLNNGSQALGRSSFYCLEYFPSQMLRTGNNFQFSYTFEDVPFHSSYAHSQSLDRLMNPLIDQYLYYLVRTQTTGTGGTQTLAFSQAGPSSMANQARNWVPGPCYRQQRVSTTTNQNNNSNFAWTGAAKFKLNGRDSLMNPGVAMASHKDDDDRFFPSSGVLIFGKQGAGNDGVDYSQVLITDEEEIKATNPVATEEYGAVAINNQAANTQAQTGLVHNQGVIPGMVWQNRDVYLQGPIWAKIPHTDGNFHPSPLMGGFGLKHPPPQILIKNTPVPADPPLTFNQAKLNSFITQYSTGQVSVEIEWELQKENSKRWNPEIQYTSNYYKSTNVDFAVNTEGVYSEPRPIGTRYLTRNL

SEQ ID NO: 972 - protein, 729 aa, Artificial Sequence
  source: /note="Description of Artificial Sequence: Synthetic polypeptide"
MEVQLQASGGGLVQAGGSLRLSCSASVRTFSIYAMGWFRQAPGKEREFVAGINRSGDVTKYADFVKGRFSISRDNAKNMVYLQMNSLKPEDTALYYCAATWAYDTVGALTSGYNFWGQGTQVTVSSGGGGSAPGKKRPVEQSPQEPDSSSGIGKTGQQPAKKRLNFGQTGDSESVPDPQPLGEPPAAPSGLGPNTMASGGGAPMADNNEGADGVGNSSGNWHCDSTWLGDRVITTSTRTWALPTYNNHLYKQISNGTSGGSTNDNTYFGYSTPWGYFDFNRFHCHFSPRDWQRLINNNWGFRPKRLNFKLFNIQVKEVTTNEGTKTIANNLTSTVQVFTDSEYQLPYVLGSAHQGCLPPFPADVFMVPQYGYLTLNNGSQALGRSSFYCLEYFPSQMLRTGNNFQFSYTFEDVPFHSSYAHSQSLDRLMNPLIDQYLYYLVRTQTTGTGGTQTLAFSQAGPSSMANQARNWVPGPCYRQQRVSTTTNQNNNSNFAWTGAAKFKLNGRDSLMNPGVAMASHKDDDDRFFPSSGVLIFGKQGAGNDGVDYSQVLITDEEEIKATNPVATEEYGAVAINNQAANTQAQTGLVHNQGVIPGMVWQNRDVYLQGPIWAKIPHTDGNFHPSPLMGGFGLKHPPPQILIKNTPVPADPPLTFNQAKLNSFITQYSTGQVSVEIEWELQKENSKRWNPEIQYTSNYYKSTNVDFAVNTEGVYSEPRPIGTRYLTRNL

SEQ ID NO: 973 - protein, 651 aa, Artificial Sequence
  source: /note="Description of Artificial Sequence: Synthetic polypeptide"
MPSSVIDALQYKLEGTTRLTRKRGLKLATALSLSNKFVEGSPSGGGGSGGGGSAPGKKRPVEQSPQEPDSSSGIGKTGQQPAKKRLNFGQTGDSESVPDPQPLGEPPAAPSGLGPNTMASGGGAPMADNNEGADGVGNSSGNWHCDSTWLGDRVITTSTRTWALPTYNNHLYKQISNGTSGGSTNDNTYFGYSTPWGYFDFNRFHCHFSPRDWQRLINNNWGFRPKRLNFKLFNIQVKEVTTNEGTKTIANNLTSTVQVFTDSEYQLPYVLGSAHQGCLPPFPADVFMVPQYGYLTLNNGSQALGRSSFYCLEYFPSQMLRTGNNFQFSYTFEDVPFHSSYAHSQSLDRLMNPLIDQYLYYLVRTQTTGTGGTQTLAFSQAGPSSMANQARNWVPGPCYRQQRVSTTTNQNNNSNFAWTGAAKFKLNGRDSLMNPGVAMASHKDDDDRFFPSSGVLIFGKQGAGNDGVDYSQVLITDEEEIKATNPVATEEYGAVAINNQAANTQAQTGLVHNQGVIPGMVWQNRDVYLQGPIWAKIPHTDGNFHPSPLMGGFGLKHPPPQILIKNTPVPADPPLTFNQAKLNSFITQYSTGQVSVEIEWELQKENSKRWNPEIQYTSNYYKSTNVDFAVNTEGVYSEPRPIGTRYLTRNL

SEQ ID NO: 974 - protein, 638 aa, Artificial Sequence
  source: /note="Description of Artificial Sequence: Synthetic polypeptide"
MYTIWMPENPRPGTPCDIFTNSRGKRASNGGGGGSGGGGSAPGKKRPVEQSPQEPDSSSGIGKTGQQPAKKRLNFGQTGDSESVPDPQPLGEPPAAPSGLGPNTMASGGGAPMADNNEGADGVGNSSGNWHCDSTWLGDRVITTSTRTWALPTYNNHLYKQISNGTSGGSTNDNTYFGYSTPWGYFDFNRFHCHFSPRDWQRLINNNWGFRPKRLNFKLFNIQVKEVTTNEGTKTIANNLTSTVQVFTDSEYQLPYVLGSAHQGCLPPFPADVFMVPQYGYLTLNNGSQALGRSSFYCLEYFPSQMLRTGNNFQFSYTFEDVPFHSSYAHSQSLDRLMNPLIDQYLYYLVRTQTTGTGGTQTLAFSQAGPSSMANQARNWVPGPCYRQQRVSTTTNQNNNSNFAWTGAAKFKLNGRDSLMNPGVAMASHKDDDDRFFPSSGVLIFGKQGAGNDGVDYSQVLITDEEEIKATNPVATEEYGAVAINNQAANTQAQTGLVHNQGVIPGMVWQNRDVYLQGPIWAKIPHTDGNFHPSPLMGGFGLKHPPPQILIKNTPVPADPPLTFNQAKLNSFITQYSTGQVSVEIEWELQKENSKRWNPEIQYTSNYYKSTNVDFAVNTEGVYSEPRPIGTRYLTRNL

SEQ ID NO: 975 - protein, 628 aa, Artificial Sequence
  source: /note="Description of Artificial Sequence: Synthetic polypeptide"
MTFFYGGSRGKRNNFKTEEYGGGGSGGGGSAPGKKRPVEQSPQEPDSSSGIGKTGQQPAKKRLNFGQTGDSESVPDPQPLGEPPAAPSGLGPNTMASGGGAPMADNNEGADGVGNSSGNWHCDSTWLGDRVITTSTRTWALPTYNNHLYKQISNGTSGGSTNDNTYFGYSTPWGYFDFNRFHCHFSPRDWQRLINNNWGFRPKRLNFKLFNIQVKEVTTNEGTKTIANNLTSTVQVFTDSEYQLPYVLGSAHQGCLPPFPADVFMVPQYGYLTLNNGSQALGRSSFYCLEYFPSQMLRTGNNFQFSYTFEDVPFHSSYAHSQSLDRLMNPLIDQYLYYLVRTQTTGTGGTQTLAFSQAGPSSMANQARNWVPGPCYRQQRVSTTTNQNNNSNFAWTGAAKFKLNGRDSLMNPGVAMASHKDDDDRFFPSSGVLIFGKQGAGNDGVDYSQVLITDEEEIKATNPVATEEYGAVAINNQAANTQAQTGLVHNQGVIPGMVWQNRDVYLQGPIWAKIPHTDGNFHPSPLMGGFGLKHPPPQILIKNTPVPADPPLTFNQAKLNSFITQYSTGQVSVEIEWELQKENSKRWNPEIQYTSNYYKSTNVDFAVNTEGVYSEPRPIGTRYLTRNL

SEQ ID NO: 976 - protein, 621 aa, Artificial Sequence
  source: /note="Description of Artificial Sequence: Synthetic polypeptide"
MNNQKIVNLKEKVAQLEAGGGGSAPGKKRPVEQSPQEPDSSAGIGKSGAQPAKKRLNFGQTGDTESVPDPQPIGEPPAAPSGVGSLTMASGGGAPVADNNEGADGVGSSSGNWHCDSQWLGDRVITTSTRTWALPTYNNHLYKQISNSTSGGSSNDNAYFGYSTPWGYFDFNRFHCHFSPRDWQRLINNNWGFRPKRLNFKLFNIQVKEVTDNNGVKTIANNLTSTVQVFTDSDYQLPYVLGSAHEGCLPPFPADVFMIPQYGYLTLNDGSQAVGRSSFYCLEYFPSQMLRTGNNFQFNYEFENVPFHSSYAHSQSLDRLMNPLIDQYLYYLSKTINDSGQNQQTLKFSVAGPSNMAVQGRNYIPGPSYRQQRVSTTVTQNNNSEFAWPGASSWALNGRNSLMNPGPAMASHKEGEDRFFPLSGSLIFGKQGTGRDNVDADEVMITNEEEIKTTNPVATESYGQVAINHQSAQAQAQTGWVQNQGILPGMVWQDRDVYLQGPIWAKIPHTDGNFHPSPLMGGFGMKHPPPQILIKNTPVPADPPTAFNKDKLNSFITQYSTGQVSVEIEWELQKENSKRWNPEIQYTSNYYKSNNVEFAVNTEGVYSEPRPIGTRYLTRNL

SEQ ID NO: 977 - protein, 633 aa, Artificial Sequence
  source: /note="Description of Artificial Sequence: Synthetic polypeptide"
MYTIWMPENPRPGTPCDIFTNSRGKRASNGGGGGSAPGKKRPVEQSPQEPDSSAGIGKSGAQPAKKRLNFGQTGDTESVPDPQPIGEPPAAPSGVGSLTMASGGGAPVADNNEGADGVGSSSGNWHCDSQWLGDRVITTSTRTWALPTYNNHLYKQISNSTSGGSSNDNAYFGYSTPWGYFDFNRFHCHFSPRDWQRLINNNWGFRPKRLNFKLFNIQVKEVTDNNGVKTIANNLTSTVQVFTDSDYQLPYVLGSAHEGCLPPFPADVFMIPQYGYLTLNDGSQAVGRSSFYCLEYFPSQMLRTGNNFQFNYEFENVPFHSSYAHSQSLDRLMNPLIDQYLYYLSKTINDSGQNQQTLKFSVAGPSNMAVQGRNYIPGPSYRQQRVSTTVTQNNNSEFAWPGASSWALNGRNSLMNPGPAMASHKEGEDRFFPLSGSLIFGKQGTGRDNVDADEVMITNEEEIKTTNPVATESYGQVAINHQSAQAQAQTGWVQNQGILPGMVWQDRDVYLQGPIWAKIPHTDGNFHPSPLMGGFGMKHPPPQILIKNTPVPADPPTAFNKDKLNSFITQYSTGQVSVEIEWELQKENSKRWNPEIQYTSNYYKSNNVEFAVNTEGVYSEPRPIGTRYLTRNL

SEQ ID NO: 978 - protein, 623 aa, Artificial Sequence
  source: /note="Description of Artificial Sequence: Synthetic polypeptide"
MTFFYGGSRGKRNNFKTEEYGGGGSAPGKKRPVEQSPQEPDSSAGIGKSGAQPAKKRLNFGQTGDTESVPDPQPIGEPPAAPSGVGSLTMASGGGAPVADNNEGADGVGSSSGNWHCDSQWLGDRVITTSTRTWALPTYNNHLYKQISNSTSGGSSNDNAYFGYSTPWGYFDFNRFHCHFSPRDWQRLINNNWGFRPKRLNFKLFNIQVKEVTDNNGVKTIANNLTSTVQVFTDSDYQLPYVLGSAHEGCLPPFPADVFMIPQYGYLTLNDGSQAVGRSSFYCLEYFPSQMLRTGNNFQFNYEFENVPFHSSYAHSQSLDRLMNPLIDQYLYYLSKTINDSGQNQQTLKFSVAGPSNMAVQGRNYIPGPSYRQQRVSTTVTQNNNSEFAWPGASSWALNGRNSLMNPGPAMASHKEGEDRFFPLSGSLIFGKQGTGRDNVDADEVMITNEEEIKTTNPVATESYGQVAINHQSAQAQAQTGWVQNQGILPGMVWQDRDVYLQGPIWAKIPHTDGNFHPSPLMGGFGMKHPPPQILIKNTPVPADPPTAFNKDKLNSFITQYSTGQVSVEIEWELQKENSKRWNPEIQYTSNYYKSNNVEFAVNTEGVYSEPRPIGTRYLTRNL

SEQ ID NO: 979 - protein, 623 aa, Artificial Sequence
  source: /note="Description of Artificial Sequence: Synthetic polypeptide"
MAAAAAAAAAAAAAAAAAAAGGGGSAPGKKRPVEQSPQEPDSSAGIGKSGAQPAKKRLNFGQTGDTESVPDPQPIGEPPAAPSGVGSLTMASGGGAPVADNNEGADGVGSSSGNWHCDSQWLGDRVITTSTRTWALPTYNNHLYKQISNSTSGGSSNDNAYFGYSTPWGYFDFNRFHCHFSPRDWQRLINNNWGFRPKRLNFKLFNIQVKEVTDNNGVKTIANNLTSTVQVFTDSDYQLPYVLGSAHEGCLPPFPADVFMIPQYGYLTLNDGSQAVGRSSFYCLEYFPSQMLRTGNNFQFNYEFENVPFHSSYAHSQSLDRLMNPLIDQYLYYLSKTINDSGQNQQTLKFSVAGPSNMAVQGRNYIPGPSYRQQRVSTTVTQNNNSEFAWPGASSWALNGRNSLMNPGPAMASHKEGEDRFFPLSGSLIFGKQGTGRDNVDADEVMITNEEEIKTTNPVATESYGQVAINHQSAQAQAQTGWVQNQGILPGMVWQDRDVYLQGPIWAKIPHTDGNFHPSPLMGGFGMKHPPPQILIKNTPVPADPPTAFNKDKLNSFITQYSTGQVSVEIEWELQKENSKRWNPEIQYTSNYYKSNNVEFAVNTEGVYSEPRPIGTRYLTRNL

SEQ ID NO: 980 - DNA, 2214 bp, Artificial Sequence
  source: /note="Description of Artificial Sequence: Synthetic polynucleotide"
atggctgccgatggttatcttccagattggctcgaggacaacctctctgagggcattcgcgagtggtgggacttgaaacctggagccccgaagcccaaagccaaccagcaaaagcaggacgacggccggggtctggtgcttcctggctacaagtacctcggacccttcaacggactcgacaagggggagcccgtcaacgcggcggacgcagcggccctcgagcacgacaaggcctacgaccagcagctcaaagcgggtgacaatccgtacctgcggtataaccacgccgacgtcgagtttcaggagcgtctgcaagaagatacgtcttttgggggcaacctcgggcgagcagtcttccaggccaagaagagggttctcgaaccttttggtctggttgaggaaggcgctaagacggctcctggaaagaaacgtccggtagagcagtcgccacaagagccagactcctcctcgggcatcggcaagaaaggccaacagcccgccagaaaaagactcaattttggccagactggcgactcagagtcagttccagaccctcaacctctcggagaacctccagcagcgccctctggtgtgggacctaatacaatggctgcaggcggtggcgcaccaatggcagacaataacgagggcgccgacggagtgggtaattcctcgggaaattggcattgcgattccacatggatgggggacagagtcatcaccaccagcacccgaacctgggccctgcccacctacaacaaccacctctacaagcaaatctccaacggcacctcgggaggaagcaccaacgacaacacctattttggctacagcaccccctgggggtattttgatttcaacagattccactgccacttctcaccacgtgactggcagcgactcatcaacaacaactggggattccggccaaaaagactcagcttcaagctcttcaacatccaggtcaaggaggtcacgcagaatgaaggcaccaagaccatcgccaataaccttaccagcacgattcaggtatttacggactcggaataccagctgccatacgtcctcggctccgcgcaccagggctgcctgcctccgttcccggcggacgtcttcatgattccccagtacggctaccttacactgaacaatggaagtcaagccgtaggccgttcctccttctactgcctggaatattttccttctcaaatgctgagaacgggcaacaactttgagttcagctaccagtttgaggacgtgccttttcacagcagctacgcgcacagccaaagcctggaccggctgatgaaccccctcatcgaccagtacctgtactacctgtctcggactcagtccacgggaggtaccgcaagaactcagcagttgctattttctcaggccgggcctaatacaatggccaatcaggcaaagaactggctgccaggaccctgttaccgccaacaacgcgtctcaacgacaaccgggcaaaacaacaatagcaactctgcctggactgctgggaccaaataccatctgaatggaagaaattcattggctaatcctggcatcgctatggcaacacacaaagacgacgaggagcgtttttttcccagtaacgggatcctgatttttggcaaacaaaatgctgccagagacaatgcggattacagcgatgtcatgctcaccagcgaggaagaaatcaaaaccactaaccctgtggctacagaggaatacggtatcgtggcagataacttgcagcagcaaaacacggctcctcaaattggaactgtcaacagccagggggccttacccggtatggtctggcagaaccgggacgtgtacctgcagggtcccatctgggccaagattcctcacacggacggcaacttccacccatctccgctgatgggcggctttggcctgaaacatcctccgcctcagatcctgatcaagaacacgcctgtacctgcggatcctccgaccaccttcaaccagtcaaagctgaactctttcatcacgcaatacagcaccggacaggtcagcgtggaaattgaatgggagctacagaaggaaaacagcaagcgctggaaccccgagatccagtacacctccaactactacaaatctacaagtgtggactttgctgttaatacagaaggcgtgtactctgaaccccgccccattggcacccgttacctcacccgtaatctgtaa

SEQ ID NO: 981 - DNA, 2214 bp, Artificial Sequence
  source: /note="Description of Artificial Sequence: Synthetic polynucleotide"
atggctgccgatggttatcttccagattggctcgaggacaacctctctgagggcattcgcgagtggtgggcgctgaaacctggagccccgaagcccaaagccaaccagcaaaagcaggacgacggccggggtctggtgcttcctggctacaagtacctcggacccttcaacggactcgacaagggggagcccgtcaacgcggcggacgcagcggccctcgagcacgacaaggcctacgaccagcagctcaaagcgggtgacaatccgtacctgcggtataaccacgccgacgccgagtttcaggagcgtctgcaagaagatacgtcttttgggggcaacctcgggcgagcagtcttccaggccaagaagcgggttctcgaacctctcggtctggttgaggacggcgctaagacggctcctggaaagaagagaccagtagagcagtcaccccaagaaccagactcctcctcgggcatcggcaagaaaggccaacagcccgccagaaaaagactcaattttggccagactggcgactcagagtcagttccagaccctcaacctctcggagaacctccagcaacccccgctgctgtgggacctactacaatggcttcaggcggtggcgcaccaatggcagacaataacgaaggcgccgacggagtgggtagttcctcgggaaattggcattgcgattccacatggctgggcgacagagtcatcaccaccagcacccgaacctgggccctgcccacctacaacaaccacctctacaagcaaatctccaacgggacatcgggaggagccaccaacgacaacacctacttcggctacagcaccccctgggggtattttgactttaacagattccactgccacttttcaccacgtgactggcagcgactcatcaacaacaactggggattccggcccaagagactcagcttcaagctcttcaacatccaggtcaaggaggtcacgcagaatgaaggcaccaagaccatcgccaataacctcaccagcaccatccaggtgtttacggactcggagtaccagctgccgtacgttctcggctctgcccaccagggctgcctgcctccgttcccggcggacgtgttcatgattccccagtacggctacctaacactcaacaacggtagtcaggccgtgggacgctcctccttctactgcctggaatactttccttcgcagatgctgagaaccggcaacaacttccagtttacttacaccttcgaggacgtgcctttccacagcagctacgcccacagccagagcttggaccggctgatgaatcctctgattgaccagtacctgtactacttgtctcggactcaaacaacaggaggcacggcaaatacgcagactctgggcttcagccaaggtgggcctaatacaatggccaatcaggcaaagaactggctgccaggaccctgttaccgccaacaacgcgtctcaacgacaaccgggcaaaacaacaatagcaactttgcctggactgctgggaccaaataccatctgaatggaagaaattcattggctaatcctggcatcgctatggcaacacacaaggacgacgaggagcgtttttttcccagtaacgggatcctgatttttggcaaacaaaatgctgccagagacaatgcggattacagcgatgtcatgctcaccagcgaggaagaaatcaaaaccactaaccctgtggctacagaggaatacggtatcgtggcagataacttgcagcagcaaaacacggctcctcaaattggaactgtcaacagccagggggccttacccggtatggtctggcagaaccgggacgtgtacctgcagggtcccatctgggccaagattcctcacacggacggcaacttccacccgtctccgctgatgggcggctttggcctgaaacatcctccgcctcagatcctgatcaagaacacgcctgtacctgcggatcctccgaccaccttcaaccagtcaaagctgaactctttcatcacgcaatacagcaccggacaggtcagcgtggaaatcgagtgggagctgcagaaagaaaacagcaagcgctggaaccccgagatccagtacacctccaactactacaaatctacaaatgtggactttgctgtcaacacggagggggtttatagcgagcctcgccccattggcacccgttacctcacccgcaacctgtaa

SEQ ID NO: 982 - DNA, 2211 bp, Artificial Sequence
  source: /note="Description of Artificial Sequence: Synthetic polynucleotide"
  modified_base (715)..(715): a, c, t, or g
atggctgccgatggttatcttccagattggctcgaggacaacctctctgagggcattcgcgagtggtgggcgctgaaacctggagccccgaagcccaaagccaaccagcaaaagcaggacgacggccggggtctggtgcttcctggctacaagtacctcggacccttcaacggactcgacaagggggagcccgtcaacgcggcggacgcagcggccctcgagcacgacaaggcctacgaccagcagctcaaagcgggtgacaatccgtacctgcggtataaccacgccgacgccgagtttcaggagcgtctgcaagaagatacgtcttttgggggcaacctcgggcgagcagtcttccaggccaagaagcgggttctcgaacctctcggtctggttgaggaaggcgctaagacggctcctggaaagaaacgtccggtagagcagtcgccacaagagccagactcctcctcgggcatcggcaagacaggccagcagcccgctaaaaagaggctcaattttggtcagactggcgactcagagtcagtccccgacccacaacctctcggagaacctccagcaacccccgctgctgtgggacctactacaatggcttcaggcggtggcgcaccaatggcagacaataacgaaggcgccgacggagtgggtaatgcctcaggaaattggcattgcgattccacatggctgggcgacagantcatcaccaccagcacccgaacatgggccttgcccacctataacaaccacctctacaagcaaatctccagtgcttcaacgggggccagcaacgacaaccactacttcggctacagcaccccctgggggtattttgatttcaacagattccactgccatttctcaccacgtgactggcagcgactcatcaacaacaattggggattccggcccaagagactcaacttcaagctcttcaacatccaagtcaaggaggtcacgcagaatgaaggcaccaagaccatcgccaataacctcaccagcaccatccaggtgtttacggactcggagtaccagctgccgtacgttctcggctctgcccaccagggctgcctgcctccgttcccggcggacgtgttcatgattccccagtacggctacctaacactcaacaacggtagtcaggccgtgggacgctcctccttctactgcctggaatattttccatctcaaatgctgcgaactggaaacaattttgaattcagctacaccttcgaggacgtgcctttccacagcagctacgcacacagccagagcttggaccgactgatgaatcctctcatcgaccagtacctgtactacttgtctcggactcaaacaacaggaggcacggcaaatacgcagactctgggcttcagccaaggtgggcctaatacaatggccaatcaggcaaagaactggctgccaggaccctgttaccgccaacaacgcgtctcaacgacaaccgggcaaaacaacaatagcaactttgcctggactgctgggaccaaataccatctgaatggaagaaattcattggctaatcctggcatcgctatggcaacacacaaagacgacgaggagcgtttttttcccagtaacgggatcctgatttttggcaaacaaaatgctgccagagacaatgcggattacagcgatgtcatgctcaccagcgaggaagaaatcaaaaccactaaccctgtggctacagaggaatacggtatcgtggcagataacttgcagcagcaaaacacggctcctcaaattggaactgtcaacagccaggggaccttacccggtatggtctggcagaaccgggacgtgtacctgcagggtcccatctgggccaagattcctcacacggacggcaacttccacccgtctccgctgatgggcggctttggcctgaaacatcctccgcctcagatcctgatcaagaacacgcctgtacctgcggatcctccgaccaccttcaaccagtcaaagctgaactctttcatcacgcaatacagcaccggacaggtcagcgtggaaattgaatgggagctacagaaggaaaacagcaagcgctggaaccccgagatccagtacacctccaattactacaaatctacaagtgtggactttgctgttaatacagaaggcgtgtactctgaaccccgccccattggcacgcgtttcctcacccgtaatctgtaa

SEQ ID NO: 983 - DNA, 2214 bp, Artificial Sequence
  source: /note="Description of Artificial Sequence: Synthetic polynucleotide"
atggctgccgatggttatcttccagattggctcgaggacaacctctctgagggcattcgcgagtggtgggcgctgaaacctggagccccgaagcccaaagccaaccagcaaaagcaggacgacggccggggtctggtgcttcctggctacaagtacctcggacccttcaacggactcgacaagggggagcccgtcaacgcggcggacgcagcggccctcgagcacgacaaggcctacgaccagcagctcaaagcgggtgacaatccgtacctgcggtataaccacgccgacgccgagtttcaggagcgtctgcaagaagatacgtcttttgggggcaacctcgggcgagcagtcttccaggccaagaagcgggttctcgaacctctcggtctggttgaggaaggcgctaagacggctcctggaaagaaacgtccggtagagcagtcgccacaagagccagactcctcctcgggcatcggcaagacaggccagcagcccgctaaaaagaggctcaattttggccagactggcgactcagagtcagttccagaccctcaacctctcggagaacctccagcagcgccctctggtgtgggacctaatacaatggctgcaggcggtggcgcaccaatggcagacaataacgaaggcgccgacggagtgggtagttcctcgggaaattggcattgcgattccacatggctgggcgacagagtcatcaccaccagcacccgaacctgggccctgcccacctacaacaaccacctctacaagcaaatctccaacgggacatcgggaggagccaccaacgacaacacctacttcggctacagcaccccctgggggtattttgactttaacagattccactgccacttttcaccacgtgactggcagcgactcatcaacaacaactggggattccggcccaagagactcagcttcaagctcttcaacatccaggtcaaggaggtcacgcagaatgaaggcaccaagaccatcgccaataacctcaccagcaccatccaggtgtttacggactcggagtaccagctgccgtacgtactaggatccgctcaccagggatgtctgcctccgttcccggcggacgtgttcatgattccccagtacggctacctaacactcaacaacggtagtcaggccgtgggacgctcctccttctactgcctggaatattttccatctcagatgctgagaacgggcaataactttaccttcagctacaccttcgaggacgtgcctttccacagcagctatgcccacagccagagcttggaccggctgatgaatcctctgattgaccagtacctgtactacttgtctcggactcaaacaacaggaggcacggcaaatacgcagactctgggcttcagccaaggtgggcctaatacaatggccaatcaggcaaagaactggctgccaggaccctgttaccgccaacaacgcgtctcaacgacaaccgggcaaaacaacaatagcaactttgcctggactgctgggaccaaataccatctgaatggaagaaattcattggctaatcctggcatcgctatggcaacacacaaagacgacgaggagcgtttttttcccagtaacgggatcctgatttttggcaaacaaaatgctgccagagacaatgcggattacagcgatgtcatgctcaccagcgaggaagaaatcaaaaccactaaccctgtggctacagaggaatacggtatcgtggcagataacttgcagcagcaaaacacggctcctcaaattggaactgtcaacagccagggggccttacccggtatggtctggcagaaccgggacgtgtacctgcagggtcccatctgggccaagattcctcacacggacggcaacttccacccgtctccgctaatgggaggatttggactgaagcacccacctcctcagatcctgatcaagaacacgccggtacctgcggatcctccgaccaccttcaaccagtcaaagctgtactctttcatcacgcaatacagcaccggacaggtcagcgtggaaattgaatgggagctgcagaaggaaaacagcaagcgctggaaccccgagatccaatacacctccaactactacaaatctacaagtgtggactttgctgttaatacagaaggcgtgtactctgaaccccgccccattggcacccgttacctcacccgtaatctgtaa

SEQ ID NO: 984 - protein, 737 aa, Artificial Sequence
  source: /note="Description of Artificial Sequence: Synthetic polypeptide"
MAADGYLPDWLEDNLSEGIREWWDLKPGAPKPKANQQKQDDGRGLVLPGYKYLGPFNGLDKGEPVNAADAAALEHDKAYDQQLKAGDNPYLRYNHADVEFQERLQEDTSFGGNLGRAVFQAKKRVLEPFGLVEEGAKTAPGKKRPVEQSPQEPDSSSGIGKKGQQPARKRLNFGQTGDSESVPDPQPLGEPPAAPSGVGPNTMAAGGGAPMADNNEGADGVGNSSGNWHCDSTWMGDRVITTSTRTWALPTYNNHLYKQISNGTSGGSTNDNTYFGYSTPWGYFDFNRFHCHFSPRDWQRLINNNWGFRPKRLSFKLFNIQVKEVTQNEGTKTIANNLTSTIQVFTDSEYQLPYVLGSAHQGCLPPFPADVFMIPQYGYLTLNNGSQAVGRSSFYCLEYFPSQMLRTGNNFEFSYQFEDVPFHSSYAHSQSLDRLMNPLIDQYLYYLSRTQSTGGTARTQQLLFSQAGPNTMANQAKNWLPGPCYRQQRVSTTTGQNNNSNSAWTAGTKYHLNGRNSLANPGIAMATHKDDEERFFPSNGILIFGKQNAARDNADYSDVMLTSEEEIKTTNPVATEEYGIVADNLQQQNTAPQIGTVNSQGALPGMVWQNRDVYLQGPIWAKIPHTDGNFHPSPLMGGFGLKHPPPQILIKNTPVPADPPTTFNQSKLNSFITQYSTGQVSVEIEWELQKENSKRWNPEIQYTSNYYKSTSVDFAVNTEGVYSEPRPIGTRYLTRNL

SEQ ID NO: 985 - protein, 737 aa, Artificial Sequence
  source: /note="Description of Artificial Sequence: Synthetic polypeptide"
MAADGYLPDWLEDNLSEGIREWWALKPGAPKPKANQQKQDDGRGLVLPGYKYLGPFNGLDKGEPVNAADAAALEHDKAYDQQLKAGDNPYLRYNHADAEFQERLQEDTSFGGNLGRAVFQAKKRVLEPLGLVEDGAKTAPGKKRPVEQSPQEPDSSSGIGKKGQQPARKRLNFGQTGDSESVPDPQPLGEPPATPAAVGPTTMASGGGAPMADNNEGADGVGSSSGNWHCDSTWLGDRVITTSTRTWALPTYNNHLYKQISNGTSGGATNDNTYFGYSTPWGYFDFNRFHCHFSPRDWQRLINNNWGFRPKRLSFKLFNIQVKEVTQNEGTKTIANNLTSTIQVFTDSEYQLPYVLGSAHQGCLPPFPADVFMIPQYGYLTLNNGSQAVGRSSFYCLEYFPSQMLRTGNNFQFTYTFEDVPFHSSYAHSQSLDRLMNPLIDQYLYYLSRTQTTGGTANTQTLGFSQGGPNTMANQAKNWLPGPCYRQQRVSTTTGQNNNSNFAWTAGTKYHLNGRNSLANPGIAMATHKDDEERFFPSNGILIFGKQNAARDNADYSDVMLTSEEEIKTTNPVATEEYGIVADNLQQQNTAPQIGTVNSQGALPGMVWQNRDVYLQGPIWAKIPHTDGNFHPSPLMGGFGLKHPPPQILIKNTPVPADPPTTFNQSKLNSFITQYSTGQVSVEIEWELQKENSKRWNPEIQYTSNYYKSTNVDFAVNTEGVYSEPRPIGTRYLTRNL

SEQ ID NO: 986 - protein, 736 aa, Artificial Sequence
  source: /note="Description of Artificial Sequence: Synthetic polypeptide"
  MOD_RES (239)..(239): Any naturally occurring amino acid
MAADGYLPDWLEDNLSEGIREWWALKPGAPKPKANQQKQDDGRGLVLPGYKYLGPFNGLDKGEPVNAADAAALEHDKAYDQQLKAGDNPYLRYNHADAEFQERLQEDTSFGGNLGRAVFQAKKRVLEPLGLVEEGAKTAPGKKRPVEQSPQEPDSSSGIGKTGQQPAKKRLNFGQTGDSESVPDPQPLGEPPATPAAVGPTTMASGGGAPMADNNEGADGVGNASGNWHCDSTWLGDRXITTSTRTWALPTYNNHLYKQISSASTGASNDNHYFGYSTPWGYFDFNRFHCHFSPRDWQRLINNNWGFRPKRLNFKLFNIQVKEVTQNEGTKTIANNLTSTIQVFTDSEYQLPYVLGSAHQGCLPPFPADVFMIPQYGYLTLNNGSQAVGRSSFYCLEYFPSQMLRTGNNFEFSYTFEDVPFHSSYAHSQSLDRLMNPLIDQYLYYLSRTQTTGGTANTQTLGFSQGGPNTMANQAKNWLPGPCYRQQRVSTTTGQNNNSNFAWTAGTKYHLNGRNSLANPGIAMATHKDDEERFFPSNGILIFGKQNAARDNADYSDVMLTSEEEIKTTNPVATEEYGIVADNLQQQNTAPQIGTVNSQGTLPGMVWQNRDVYLQGPIWAKIPHTDGNFHPSPLMGGFGLKHPPPQILIKNTPVPADPPTTFNQSKLNSFITQYSTGQVSVEIEWELQKENSKRWNPEIQYTSNYYKSTSVDFAVNTEGVYSEPRPIGTRFLTRNL

SEQ ID NO: 987 - protein, 737 aa, Artificial Sequence
  source: /note="Description of Artificial Sequence: Synthetic polypeptide"
MAADGYLPDWLEDNLSEGIREWWALKPGAPKPKANQQKQDDGRGLVLPGYKYLGPFNGLDKGEPVNAADAAALEHDKAYDQQLKAGDNPYLRYNHADAEFQERLQEDTSFGGNLGRAVFQAKKRVLEPLGLVEEGAKTAPGKKRPVEQSPQEPDSSSGIGKTGQQPAKKRLNFGQTGDSESVPDPQPLGEPPAAPSGVGPNTMAAGGGAPMADNNEGADGVGSSSGNWHCDSTWLGDRVITTSTRTWALPTYNNHLYKQISNGTSGGATNDNTYFGYSTPWGYFDFNRFHCHFSPRDWQRLINNNWGFRPKRLSFKLFNIQVKEVTQNEGTKTIANNLTSTIQVFTDSEYQLPYVLGSAHQGCLPPFPADVFMIPQYGYLTLNNGSQAVGRSSFYCLEYFPSQMLRTGNNFTFSYTFEDVPFHSSYAHSQSLDRLMNPLIDQYLYYLSRTQTTGGTANTQTLGFSQGGPNTMANQAKNWLPGPCYRQQRVSTTTGQNNNSNFAWTAGTKYHLNGRNSLANPGIAMATHKDDEERFFPSNGILIFGKQNAARDNADYSDVMLTSEEEIKTTNPVATEEYGIVADNLQQQNTAPQIGTVNSQGALPGMVWQNRDVYLQGPIWAKIPHTDGNFHPSPLMGGFGLKHPPPQILIKNTPVPADPPTTFNQSKLYSFITQYSTGQVSVEIEWELQKENSKRWNPEIQYTSNYYKSTSVDFAVNTEGVYSEPRPIGTRYLTRNL

SEQ ID NO: 988 - DNA, 2208 bp, Artificial Sequence
  source: /note="Description of Artificial Sequence: Synthetic polynucleotide"
atggctgccgatggttatcttccagattggctcgaggacaacctctctgagggcattcgcgagtggtgggacttgaaacctggagccccgaaacccaaagccaaccagcaaaagcaggacgacggccggggtctggtgcttcctggctacaagtacctcggacccttcaacggactcgacaagggggagcccgtcaacgcggcggatgcagcggccctcgagcacgacaaagcctacgaccggcagctcgacagcggagacaacccgtacctcaagtacaaccacgccgacgcggagtttcaggagcgccttaaagaagatacgtcttttgggggcaacctcggacgagcagtcttccaggccaagaagagggttctcgaaccttttggtctggttgaggaaggtgctaagacggctcctggaaagaaacgtccggtagagcagtcgccacaagagccagactcctcctcgggcattggcaagacaggccagcagcccgctaaaaagagactcaattttggtcagactggcgactcagagtcagtccccgacccacaacctctcggagaacctccagcaacccccgctgctgtgggacctactacaatggcttcaggtggtggcgcaccagtggcagacaataacgaaggcgccgacggagtgggtagttcctcgggaaattggcattgcgattccacatggctgggcgacagagtcatcaccaccagcacccgaacatgggccttgcccacctataacaaccacctctacaagcaaatctccagtgcttcgacgggggccagcaacgacaaccactacttcggctacagcaccccctgggggtattttgatttcaacaggttccactgccatttctcaccacgtgactggcagcgactcatcaacaacaattggggattccggcccaaaagactcaacttcaagctgttcaacatccaggtcaaggaagtcacgacgaacgaaggcaccaagaccatcgccaataatctcaccagcaccgtgcaggtctttacggactcggagtaccagttaccgtacgtgctaggatccgctcaccagggatgtctgcctccgttcccggcggacgtcttcatggttcctcagtacggctatttaactttaaacaatggaagccaagccctgggacgttcctccttctactgtctggagtatttcccatcgcagatgctgagaacgggcaacaactttacctttagctacaccttcgaggacgtgcctttccacagcagctacgcgcacagccagagcctggacaggctgatgaatcccctcatcgaccagtacctgtactacctggtcagaacgcaaacgactggaactggagggacgcagactctggcattcagccaagcgggtcctagctcaatggccaaccaggctagaaattgggtgcccggaccttgctaccggcagcagcgcgtctccacgacaaccaaccagaacaacaacagcaactttgcctggacgggagctgccaagtttaagctgaacggccgagactctctaatgaatccgggcgtggcaatggcttcccacaaggatgacgacgaccgcttcttcccttcgagcggggtcctgatttttggcaagcaaggagccgggaacgatggagtggattacagccaagtgctgattacagatgaggaagaaatcaaggctaccaaccccgtggccacagaagaatatggagcagtggccatcaacaaccaggccgccaatacgcaggcgcagaccggactcgtgcacaaccagggggtgattcccggcatggtgtggcagaatagagacgtgtacctgcagggtcccatctgggccaaaattcctcacacggacggcaactttcacccgtctcccctgatgggcggctttggactgaagcacccgcctcctcaaattctcatcaagaacacaccggttccagcggacccgccgcttaccttcaaccaggccaagctgaactctttcatcacgcagtacagcaccggacaggtcagcgtggaaatcgagtgggagctgcagaaagaaaacagcaaacgctggaatccagagattcaatacacttccaactactacaaatctacaaatgtggactttgctgtcaacacggagggggtttatagcgagcctcgccccattggcacccgttacctcacccgcaacctgtaa

SEQ ID NO: 989 - DNA, 2211 bp, Artificial Sequence
  source: /note="Description of Artificial Sequence: Synthetic polynucleotide"
  modified_base (337)..(337): a, c, t, or g
atggctgccgatggttatcttccagattggctcgaggacactctctctgaaggaataagacagtggtggaagctcaaacctggcccaccaccaccaaagcccgcagagcggcataaggacgacagcaggggtcttgtgcttcctggctacaagtacctcggacccttcaacggactcgacaagggggagcccgtcaacgcggcggacgcagcgaccctcgagcacgacaaggcctacgaccagcagctcaaagcgggtgacaatccgtacctgcggtataaccacgccgacgccgagtttcaggagcgtctgcaagaagatacgtcttttgggggcnacctcgggcgagcagtcttccaggccaagaagcgggttctcgaacctctcggtctggttgaggaagctgctaagacggctcctggaaagaagagaccagtagagccatcaccccagcgttctccagactcctctacgggcatcggcaagaaaggccaacagcccgccagaaaaagactcaattttggtcagactggcgactcagagtcagttccagaccctcaacctctcggagaacctccagcagcgccctctggtgtgggacctaatacaatggctgcaggcggtggcgcaccaatggcagacaataacgaaggcgccgacggagtgggtagttcctcgggaaattggcattgcgattccacatggctgggcgacagagtcatcaccaccagcacccgaacctgggccctgcccacctacaacaaccacctctacaagcaaatctccagtgcttcaacgggggccagcaacgacaaccactacttcggctacagcaccccctgggggtattttgatttcaacagattccactgccatttctcaccacgtgactggcagcgactcatcaacaacaattggggattccggcccaagagactcaacttcaagctcttcaacatccaagtcaaggaggtcacgacgaatgatggcgtcacgaccatcgctaataaccttaccagcacggttcaagtcttctcggactcagactatcagctcccgtacgtgctcgggtcggctcacgagggctgcctcccgccgttcccagcggacgttttcatgattcctcagtacggctatttaactttaaacaatggaagccaagccctgggacgttcctccttctactgtctggagtatttcccatcgcagatgctgagaaccggcaacaactttcagttcagctacaccttcgaggacgtgcctttccacagcagctacgcgcacagccagagcctggacaggctgatgaatcccctcatcgaccagtacctgtactacctggtcagaacgcaaacgactggaactggagggacgcagactctggcattcagccaagcgggtcctagctcaatggccaaccaggctagaaattgggtgcccggaccttgctaccggcagcagcgcgtctccacgacaaccaaccagaacaacaacagcaactttgcctggacgggagctgccaagtttaagctgaacggccgagactctctaatgaatccgggcgtggcaatggcttcccacaaggatgacgacgaccgcttcttcccttcgagcggggtcctgatttttggcaagcaaggagccgggaacgatggagtggattacagccaagtgctgattacagatgaggaagaaatcaaggctaccaaccccgtagccacagaagaatatggagcagtggccatcaacaaccaggccgccaatacgcaggcgcagaccggactcgtgcacaaccagggggtgattcccggaatggtgtggcaagacagagacgtatacctgcagggtcctatttgggccaaaattcctcacacggatggacactttcacccgtctcctctcatgggcggctttggacttaagcacccgcctcctcagatcctcatcaaaaacacgcctgttcctgcgaatcctccggcagagttttcggctacaaagtttgcttcattcatcacccagtattccacaggacaagtgagcgtggagattgaatgggagctgcagaaagaaaacagcaaacgctggaatcccgaagtgcagtatacatctaactatgcaaaatctgccaacgttgatttcactgtggacaacaatggactttatactgagcctcgccccattggcacccgttacctcacccgtcccctgtaa

SEQ ID NO: 990 - DNA, 2214 bp, Artificial Sequence
  source: /note="Description of Artificial Sequence: Synthetic polynucleotide"
  modified_base (335)..(335): a, c, t, or g
atgactgacggttaccttccagattggctagaggacaacctctctgaaggcgttcgagagtggtgggcgctgcaacctggagccccgaagcccaaagccaaccagcaaaagcaggacgacggccggggtctggtgcttcctggctacaagtacctcggacccttcaacggactcgacaagggggagcccgtcaacgcggcggacgcagcggccctcgagcacgacaaggcctacgaccagcagctcaaagcgggtgacaatccgtacctgcggtataaccacgccgacgccgagtttcaggagcgtctgcaagaagatacgtcttttgggggcancctcgggcgagcagtcttccaggccaagaagcgggttctcgaacctctcggtctggttgaggaaggcgctaagacggctcctggaaagaaacgtccggtagagccatcaccccagcgttctccagactcctctacgggcatcggcaagaaaggccaacagcccgccagaaaaagactcaattttggtcagactggcgactcagagtcagttccagaccctcaacctctcggagaacctccagcagcgccctcaggtgtgggatctcttacaatggcttcaggtggtggcgcaccagtggcagacaataacgaaggtgccgatggagtgggtagttcctcgggaaattggcattgcgattcccaatggctgggggacagagtcatcaccaccagcacccgaacctgggccctgcccacctacaacaatcacctctacaagcaaatctccaacagcacatctggaggatcttcaaatgacaacgcctacttcggctacagcaccccctgggggtattttgacttcaacagattccactgccacttctcaccacgtgactggcagcgactcatcaacaacaactggggattccggcccaagagactcagcttcaagctcttcaacatccaggtcaaggaggtcacgcagaatgaaggcaccaagaccatcgccaataacctcaccagcaccatccaggtgtttacggactcggagtaccagctgccgtacgttctcggctctgcccaccagggctgcctgcctccgttcccggcggacgtgttcatgattccccagtacggctacctaacactcaacaacggtagtcaggccgtgggacgctcctccttctactgcctggaatactttccttcgcagatgctgagaaccggcaacaacttccagtttacttacaccttcgaggacgtgcctttccacagcagctacgcccacagccagagcttggaccggctgatgaatcctctgattgaccagtacctgtactacttgtctcggactcaaacaacaggaggcacggcaaatacgcagactctgggcttcagccaaggtgggcctaatacaatggccaatcaggcaaagaactggctgccaggaccctgttaccgccaacaacgcgtctcaacgacaaccgggcaaaacaacaatagcaactttgcctggactgctgggaccaaataccatctgaatggaagaaattcattggctaatcctggcatcgctatggcaacacacaaagacgacgaggagcgtttttttcccagtaacgggatcctgatttttggcaaacaaaatgctgccagagacaatgcggattacagcgatgtcatgctcaccagcgaggaagaaatcaaaaccactaaccctgtggctacagaggaatacggtatcgtggcagataacttgcagcagcaaaacacggctcctcaaattggaactgtcaacagccagggggccttacccggtatggtctggcagaaccgggacgtgtacctgcagggtcccatctgggccaagattcctcacacggacggcaacttccacccgtctccgctgatgggcggctttggcctgaaacatcctccgcctcagatcctgatcaagaacacgcctgtacctgcggatcctccgaccaccttaaaccaggccaagctgaactctttcatcacgcaatacagcaccggacaggtcagcgtggaaattgaatgggagctgcagaaggaaaacagcaagcgctggaacccagagattcagtacacttcaaactactacaaatctacaaatgtggactttgctgtcaatacagagggaacttatagtgaaccccgccccattggcaccagatttctgactcgtaatctgtaa

SEQ ID NO: 991 - DNA, 2211 bp, Artificial Sequence
  source: /note="Description of Artificial Sequence: Synthetic polynucleotide"
  modified_base (338)..(338): a, c, t, or g
atggctgccgatggttatcttccagattggctcgaggacactctctctgaaggaataagacagtggtggaagctcaaacctggcccaccaccaccaaagcccgcagagcggcataaggacgacagcaggggtcttgtgcttcctgggtacaagtacctcggccccttcaacggactcgacaagggggagcccgtcaacgcggcggacgcagcggccctcgagcacgacaaggcctacgaccagcagctcgaagcgggtgacaatccgtacctgcggtataaccacgccgacgccgagtttcaggagcgtctgcaagaagatacgtcttttgggggcancctcgggcgagcagtcttccaggccaagaagcgggttctcgaacctctcggtctggttgaggaaggcgctaagacggctcctggaaagaagagaccagtagagcagtcaccccaagaaccagactcctcctcgggcatcggcaggaaaggccaacagcccgccagaaaaagactcaattttggccagactggcgactcagagtcagttccagaccctcaacctctcggagaacctccagcagcgccctctggtgtgggacctaatacaatggcttcaggcggtggcgctccaatggcagacaataacgaaggcgccgacggagtgggtaatgcctcaggaaattggcattgcgattccacatggctgggcgacagagtcatcaccaccagcacccgcacctgggccttgcccacctacaataaccacctctacaagcaaatctccagtgcttcaacgggggccagcaacgacaaccactacttcggctacagcaccccctgggggtattttgatttcaacagattccactgccacttttcaccacgtgactggcagcgactcatcaacaacaattggggattccggcccaagagactcaacttcaaactcttcaacatccaggtcaaggaggtcacgcagaatgaaggcactaagaccatcgccaataaccttaccagcacgattcaggtatttacggactcggaataccagctgccgtacgtcctcggctccgcgcaccagggctgcctgcctccgttcccggcggacgtcttcatgattccccagtacggctaccttacactgaacaatggaagtcaagccgtaggccgttcctccttctactgcctggaatattttccatctcaaatgctgcgaactggcaacaacttccagtttacctacaccttcgaggacgtgcctttccacagcagctacgcccacagccagagcttggaccggctgatgaatcctctgattgaccagtacctgtactacttgtctcggactcagtccacaggaggaactcaaggtacccagcaattgttattttctcaagctgggcctgcaaacatgtcggctcaggctaagaactggctacctggaccttgctaccggcagcagcgagtctctacgacactgtcgcaaaacaacaacagcaactttgcttggactggtgccaccaaatatcacctgaacggaagagactctttggtaaatcccggtgtcgccatggcaacccacaaggacgacgaggaacgcttcttcccgtcgagtggagtcctgatgtttggaaaacagggtgctggaagagacaatgtggactacagcagcgttatgctaaccagcgaagaagaaattaaaaccactaaccctgtagccacagaacaatacggtgtggtggttgataacttgcagcaaaccaatacggggcctattgtgggaaatgtcaacagccaaggagccttacctggtatggtctggcagaaccgggacgtgtacctgcagggtcccatctgggccaagattcctcacacggacggcaacttccacccgtctccgctgatgggcggctttggcctgaaacatcctccgcctcagatcctcatcaaaaacacacctgtacctgcggatcctccaacggccttcaacaaggacaagctgaactctttcatcacccagtattctactggccaagtcagcgtggagatcgagtgggagctgcagaaggaaaacagcaagcgctggaacccggagatccagtacacttccaactattacaagtctaataatgttgaatttgctgttaatactgaaggtgtatatagtgaaccccgccccattggcaccagatacctgactcgtaatctgtaa

SEQ ID NO: 992 - protein, 735 aa, Artificial Sequence
  source: /note="Description of Artificial Sequence: Synthetic polypeptide"
MAADGYLPDWLEDNLSEGIREWWDLKPGAPKPKANQQKQDDGRGLVLPGYKYLGPFNGLDKGEPVNAADAAALEHDKAYDRQLDSGDNPYLKYNHADAEFQERLKEDTSFGGNLGRAVFQAKKRVLEPFGLVEEGAKTAPGKKRPVEQSPQEPDSSSGIGKTGQQPAKKRLNFGQTGDSESVPDPQPLGEPPATPAAVGPTTMASGGGAPVADNNEGADGVGSSSGNWHCDSTWLGDRVITTSTRTWALPTYNNHLYKQISSASTGASNDNHYFGYSTPWGYFDFNRFHCHFSPRDWQRLINNNWGFRPKRLNFKLFNIQVKEVTTNEGTKTIANNLTSTVQVFTDSEYQLPYVLGSAHQGCLPPFPADVFMVPQYGYLTLNNGSQALGRSSFYCLEYFPSQMLRTGNNFTFSYTFEDVPFHSSYAHSQSLDRLMNPLIDQYLYYLVRTQTTGTGGTQTLAFSQAGPSSMANQARNWVPGPCYRQQRVSTTTNQNNNSNFAWTGAAKFKLNGRDSLMNPGVAMASHKDDDDRFFPSSGVLIFGKQGAGNDGVDYSQVLITDEEEIKATNPVATEEYGAVAINNQAANTQAQTGLVHNQGVIPGMVWQNRDVYLQGPIWAKIPHTDGNFHPSPLMGGFGLKHPPPQILIKNTPVPADPPLTFNQAKLNSFITQYSTGQVSVEIEWELQKENSKRWNPEIQYTSNYYKSTNVDFAVNTEGVYSEPRPIGTRYLTRNL

SEQ ID NO: 993 - protein, 736 aa, Artificial Sequence
  source: /note="Description of Artificial Sequence: Synthetic polypeptide"
  MOD_RES (113)..(113): Any naturally occurring amino acid
MAADGYLPDWLEDTLSEGIRQWWKLKPGPPPPKPAERHKDDSRGLVLPGYKYLGPFNGLDKGEPVNAADAATLEHDKAYDQQLKAGDNPYLRYNHADAEFQERLQEDTSFGGXLGRAVFQAKKRVLEPLGLVEEAAKTAPGKKRPVEPSPQRSPDSSTGIGKKGQQPARKRLNFGQTGDSESVPDPQPLGEPPAAPSGVGPNTMAAGGGAPMADNNEGADGVGSSSGNWHCDSTWLGDRVITTSTRTWALPTYNNHLYKQISSASTGASNDNHYFGYSTPWGYFDFNRFHCHFSPRDWQRLINNNWGFRPKRLNFKLFNIQVKEVTTNDGVTTIANNLTSTVQVFSDSDYQLPYVLGSAHEGCLPPFPADVFMIPQYGYLTLNNGSQALGRSSFYCLEYFPSQMLRTGNNFQFSYTFEDVPFHSSYAHSQSLDRLMNPLIDQYLYYLVRTQTTGTGGTQTLAFSQAGPSSMANQARNWVPGPCYRQQRVSTTTNQNNNSNFAWTGAAKFKLNGRDSLMNPGVAMASHKDDDDRFFPSSGVLIFGKQGAGNDGVDYSQVLITDEEEIKATNPVATEEYGAVAINNQAANTQAQTGLVHNQGVIPGMVWQDRDVYLQGPIWAKIPHTDGHFHPSPLMGGFGLKHPPPQILIKNTPVPANPPAEFSATKFASFITQYSTGQVSVEIEWELQKENSKRWNPEVQYTSNYAKSANVDFTVDNNGLYTEPRPIGTRYLTRPL

SEQ ID NO: 994 - protein, 737 aa, Artificial Sequence
  source: /note="Description of Artificial Sequence: Synthetic polypeptide"
  MOD_RES (112)..(112): Any naturally occurring amino acid
MTDGYLPDWLEDNLSEGVREWWALQPGAPKPKANQQKQDDGRGLVLPGYKYLGPFNGLDKGEPVNAADAAALEHDKAYDQQLKAGDNPYLRYNHADAEFQERLQEDTSFGGXLGRAVFQAKKRVLEPLGLVEEGAKTAPGKKRPVEPSPQRSPDSSTGIGKKGQQPARKRLNFGQTGDSESVPDPQPLGEPPAAPSGVGSLTMASGGGAPVADNNEGADGVGSSSGNWHCDSQWLGDRVITTSTRTWALPTYNNHLYKQISNSTSGGSSNDNAYFGYSTPWGYFDFNRFHCHFSPRDWQRLINNNWGFRPKRLSFKLFNIQVKEVTQNEGTKTIANNLTSTIQVFTDSEYQLPYVLGSAHQGCLPPFPADVFMIPQYGYLTLNNGSQAVGRSSFYCLEYFPSQMLRTGNNFQFTYTFEDVPFHSSYAHSQSLDRLMNPLIDQYLYYLSRTQTTGGTANTQTLGFSQGGPNTMANQAKNWLPGPCYRQQRVSTTTGQNNNSNFAWTAGTKYHLNGRNSLANPGIAMATHKDDEERFFPSNGILIFGKQNAARDNADYSDVMLTSEEEIKTTNPVATEEYGIVADNLQQQNTAPQIGTVNSQGALPGMVWQNRDVYLQGPIWAKIPHTDGNFHPSPLMGGFGLKHPPPQILIKNTPVPADPPTTLNQAKLNSFITQYSTGQVSVEIEWELQKENSKRWNPEIQYTSNYYKSTNVDFAVNTEGTYSEPRPIGTRFLTRNL

SEQ ID NO: 995 - protein, 736 aa, Artificial Sequence
  source: /note="Description of Artificial Sequence: Synthetic polypeptide"
  MOD_RES (113)..(113): Any naturally occurring amino acid
MAADGYLPDWLEDTLSEGIRQWWKLKPGPPPPKPAERHKDDSRGLVLPGYKYLGPFNGLDKGEPVNAADAAALEHDKAYDQQLEAGDNPYLRYNHADAEFQERLQEDTSFGGXLGRAVFQAKKRVLEPLGLVEEGAKTAPGKKRPVEQSPQEPDSSSGIGRKGQQPARKRLNFGQTGDSESVPDPQPLGEPPAAPSGVGPNTMASGGGAPMADNNEGADGVGNASGNWHCDSTWLGDRVITTSTRTWALPTYNNHLYKQISSASTGASNDNHYFGYSTPWGYFDFNRFHCHFSPRDWQRLINNNWGFRPKRLNFKLFNIQVKEVTQNEGTKTIANNLTSTIQVFTDSEYQLPYVLGSAHQGCLPPFPADVFMIPQYGYLTLNNGSQAVGRSSFYCLEYFPSQMLRTGNNFQFTYTFEDVPFHSSYAHSQSLDRLMNPLIDQYLYYLSRTQSTGGTQGTQQLLFSQAGPANMSAQAKNWLPGPCYRQQRVSTTLSQNNNSNFAWTGATKYHLNGRDSLVNPGVAMATHKDDEERFFPSSGVLMFGKQGAGRDNVDYSSVMLTSEEEIKTTNPVATEQYGVVVDNLQQTNTGPIVGNVNSQGALPGMVWQNRDVYLQGPIWAKIPHTDGNFHPSPLMGGFGLKHPPPQILIKNTPVPADPPTAFNKDKLNSFITQYSTGQVSVEIEWELQKENSKRWNPEIQYTSNYYKSNNVEFAVNTEGVYSEPRPIGTRYLTRNL

SEQ ID NO: 996 - DNA, 2211 bp, Artificial Sequence
  source: /note="Description of Artificial Sequence: Synthetic polynucleotide"
  source: /note="AAV9 VP1"
atggccgccgacggctacctgcccgactggctggaggacaacctgagcgagggcatccgcgagtggtgggccctgaagcccggcgccccccagcccaaggccaaccagcagcaccaggacaacgcccgcggcctggtgctgcccggctacaagtacctgggccccggcaacggcctggacaagggcgagcccgtgaacgccgccgacgccgccgccctggagcacgacaaggcctacgaccagcagctgaaggccggcgacaacccctacctgaagtacaaccacgccgacgccgagttccaggagcgcctgaaggaggacaccagcttcggcggcaacctgggccgcgccgtgttccaggccaagaagcgcctgctggagcccctgggcctggtggaggaggccgccaagaccgcccccggcaagaagcgccccgtggagcagagcccccaggagcccgacagcagcgccggcatcggcaagagcggcgcccagcccgccaagaagcgcctgaacttcggccagaccggcgacaccgagagcgtgcccgacccccagcccatcggcgagccccccgccgcccccagcggcgtgggcagcctgaccatggccagcggcggcggcgcccccgtggccgacaacaacgagggcgccgacggcgtgggcagcagcagcggcaactggcactgcgacagccagtggctgggcgaccgcgtgatcaccaccagcacccgcacctgggccctgcccacctacaacaaccacctgtacaagcagatcagcaacagcaccagcggcggcagcagcaacgacaacgcctacttcggctacagcaccccctggggctacttcgacttcaaccgcttccactgccacttcagcccccgcgactggcagcgcctgatcaacaacaactggggcttccgccccaagcgcctgaacttcaagctgttcaacatccaggtgaaggaggtgaccgacaacaacggcgtgaagaccatcgccaacaacctgaccagcaccgtgcaggtgttcaccgacagcgactaccagctgccctacgtgctgggcagcgcccacgagggctgcctgccccccttccccgccgacgtgttcatgatcccccagtacggctacctgaccctgaacgacggcagccaggccgtgggccgcagcagcttctactgcctggagtacttccccagccagatgctgcgcaccggcaacaacttccagttcagctacgagttcgagaacgtgcccttccacagcagctacgcccacagccagagcctggaccgcctgatgaaccccctgatcgaccagtacctgtactacctgagcaagaccatcaacggcagcggccagaaccagcagaccctgaagttcagcgtggccggccccagcaacatggccgtgcagggccgcaactacatccccggccccagctaccgccagcagcgcgtgagcaccaccgtgacccagaacaacaacagcgagttcgcctggcccggcgccagcagctgggccctgaacggccgcaacagcctgatgaaccccggccccgccatggccagccacaaggagggcgaggaccgcttcttccccctgagcggcagcctgatcttcggcaagcagggcaccggccgcgacaacgtggacgccgacaaggtgatgatcaccaacgaggaggagatcaagaccaccaaccccgtggccaccgagagctacggccaggtggccaccaaccaccagagcgcccaggcccaggcccagaccggctgggtgcagaaccagggcatcctgcccggcatggtgtggcaggaccgcgacgtgtacctgcagggccccatctgggccaagatcccccacaccgacggcaacttccaccccagccccctgatgggcggcttcggcatgaagcacccccccccccagatcctgatcaagaacacccccgtgcccgccgacccccccaccgccttcaacaaggacaagctgaacagcttcatcacccagtacagcaccggccaggtgagcgtggagatcgagtgggagctgcagaaggagaacagcaagcgctggaaccccgagatccagtacaccagcaactactacaagagcaacaacgtggagttcgccgtgaacaccgagggcgtgtacagcgagccccgccccatcggcacccgctacctgacccgcaacctgtaa

SEQ ID NO: 997 - DNA, 2211 bp, Artificial Sequence
  source: /note="Description of Artificial Sequence: Synthetic polynucleotide"
atggctgccgatggttatcttccagattggctcgaggacactctctctgaaggaataagacagtggtggaagctcaaacctggcccaccaccaccaaagcccgcagagcggcataaggacgacagcaggggtcttgtgcttcctgggtacaagtacctcggacccttcaacggactcgacaagggagagccggtcaacgaggcagacgccgcggccctcgagcacgacaaggcctacgaccagcagctcaaggccggagacaacccgtacctcaagtacaaccacgccgacgccgagttccaggagcggctcaaagaagatacgtcttttgggggcaacctcggacgagcagtcttccaggccaagaagcgggttctcgaacctctcggtctggttgaggaaggcgctaagacggctcctggaaagaaacgtccggtagagcagtcgccacaagagccagactcctcctcgggcattggcaagacaggccagcagcccgctaaaaagagactcaattttggtcagactggcgactcagagtcagtccccgacccacaacctctcggagaacctccagcaacccccgctgctgtgggacctactacaatggcttcaggcggtggcgcaccaatggcggacaataacgaaggcgccgatggagtgggtagttcctcgggaaattggcattgcgattcccaatggctgggggacagagtcatcaccaccagcacccgaacatgggccttgcccacctataacaaccacctctacaagcaaatctccagtgcttcaacgggggccagcaacgacaaccactacttcggctacagcaccccctgggggtattttgacttcaacagattccactgccacttctcaccacgtgactggcagcgactcatcaacaacaactggggattccgacccaagagactcaacttcaagctctttaacattcaagtcaaggaggtcacgcagaatgaaggcaccaagaccatcgccaataacctcaccagcaccatccaggtgtttacggactcggagtaccagctgccgtacgttctcggctccgcccaccagggctgcctgcctccgttcccggcggacgtgttcatgattccccagtacggctacctaacactcaacaacggtagtcaggccgtgggacgctcctccttctactgcctggaatactttccttcgcagatgctgagaaccggcaacaacttccagtttacttacaccttcgaggacgtgcctttccacagcagctacgcccacagccagagcttggaccggctgatgaatcctctgattgaccagtacctgtactacttgtctcggactcaaacaacaggaggcacggcaaatacgcagactctgggcttcagccaaggtgggcctaatacaatggccaatcaggcaaagaactggctgccaggaccctgttaccgccaacaacgcgtctcaacgacaaccgggcaaaacaacaatagcaactttgcctggactgctgggaccaaataccatctgaatggaagaaattcattggctaatcctggcatcgctatggcaacacacaaagacgacaaggagcgtttttttcccagtaacgggatcctgatttttggcaaacaaaatgctgccagagacaatgcggattacagcgatgtcatgctcaccagcgaggaagaaatcaaaaccactaaccctgtggctacagaggaatacggtatcgtggcagataacttgcagcagcaaaacacggctcctcaaattggaactgtcaacagccagggggccttacccggtatggtctggcagaaccgggacgtgtacctgcagggtcccatctgggccaagattcctcacacggacggcaacttccacccgtctccgctgatgggcggctttggcctgaaacatcctccgcctcagatcctgatcaagaacacgcctgtacctgcggatcctccgaccaccttcaaccagtcaaagctgaactctttcatcacgcaatacagcaccggacaggtcagcgtggaaattgaatgggagctgcagaaagaaaacagcaaacgctggaacccagagattcaatacacttccaactactacaaatctacaagtgtggactttgctgttaatacagaaggcgtgtactctgaaccccaccccattggcacccgttacctcacccgtcccctgtaa

SEQ ID NO: 998 - DNA, 2211 bp, Artificial Sequence
  source: /note="Description of Artificial Sequence: Synthetic polynucleotide"
atggctgccgatggttatcttccagattggctcgaggacaacctctctgagggcattcgcgagtggtgggcgctgaaacctggagccccgaagcccaaagccaaccagcaaaagcaggacgacggccggggtctggtgcttcctggctacaagtacctcggacccttcaacggactcgacaagggggagccggtcaacgcagcagacgcggcggccctcgagcacgacaaggcctacgaccagcagctcaaggccggagacaacccgtacctcaagtacaaccacgccgacgccgagttccaggagcggctcaaagaagatacgtcttttgggggcaacctcgggcgagcagtcttccaggccaaaaagaggcttcttgaacctcttggtctggttgaggaagcggctaagacggctcctggaaagaagaggcctgtagagcagtctcctcaggaaccggactcctccgcgggtattggcaaatcgggtgcacagcccgctaaaaagagactcaattttggtcagactggcgactcagagtcagtccccgacccacaacctctcggagaacctccagcaacccccgctgctgtgggacctactacaatggcttcaggcggtggcgcaccaatggcagacaataacgaaggcgccgacggagtgggtaatgcctcaggaaattggcattgcgattccacatggctgggcgacagagtcatcaccaccagcacccgaacctgggccctgcccacctacaataaccacctctacaagcaaatctccagtgcttcaacgggggccagcaacgacaaccactacttcggctacagcaccccctgggggtattttgatttcaacagattccactgccacttttcaccacgtgactggcagcgactcatcaacaacaattggggattccggcccaagagactcaacttcaaactcttcaacatccaagtcaaggaggtcacgcagaatgaaggcaccaagaccatcgccaataacctcaccagcaccatccaggtgtttacggactcggagtaccagctgccgtacgttctcggctctgcccaccagggctgcctgcctccgttcccggcggacgtgttcatgattccccagtacggctacctaacactcaacaacggtagtcaggccgtgggacgctcctccttctactgcctggaatactttccttcgcagatgctgagaaccggcaacaacttccagtttacttacaccttcgaggacgtgcctttccacagcagctacgcccacagccagagcttggaccggctgatgaatcctctgattgaccagtacctgtactacttgtctcggactcaaacaacaggaggcacggcaaatacgcagactctgggcttcagccaaggtgggcctaatacaatggccaatcaggcaaagaactggctgccaggaccctgttaccgccaacaacgcgtctcaacgacaaccgggcaaaacaacaatagcaactttgcctggactgctgggaccaaataccatctgaatggaagaaattcattggctaatcctggcatcgctatggcaacacacaaagacgacaaggagcgtttttttcccagtaacgggatcctgatttttggcaaacaaaatgctgccagagacaatgcggattacagcgatgtcatgctcaccagcgaggaagaaatcaaagccactaaccctgtggctacagaggaatacggtatcgtggcagataacttgcagcagcaaaacacggctcctcaaattggaactgtcaacagccagggggccttacccggtatggtttggcagaaccgggacgtgtacctgcagggtcccatctgggccaagattcctcacacggacggcaacttccacccgtctccgctgatgggcggctttggcctgaaacatcctccgcctcagatcctgatcaagaacacgcctgtacctgcggatcctccgaccaccttcaaccagtcaaagctgaactctttcatcacgcaatacagcaccggacaggtcagcgtggaaattgaatgggagctgcagaaggaaaacagcaagcgctggaaccccgagatccagtacacctccaactactacaaatctacaagtgtggactttgctgttaatacagaaggcgtgtactctgaaccccaccccattggcacccgttacctcacccgtcccctgtaa

SEQ ID NO: 999 - DNA, 2214 bp, Artificial Sequence
  source: /note="Description of Artificial Sequence: Synthetic polynucleotide"
atggctgccgatggttatcttccagattggctcgaggacaacctctctgagggcattcgcgagtggtgggacttgaaacctggagccccgaagcccaaagccaaccagcaaaagcaggacgacggccggggtctggtgcttcctggctacaagtacctcggacccttcaacggactcgacaagggggagcccgtcaacgcggcggacgcagcggccctcgagcacgacaaggcctacgaccagcagctcaaagcgggtgacaatccgtacctgcggtataaccacgccgacgccgagtttcaggagcgtctgcaagaagatacgtcttttgggggcaacctcgggcgagcagtcttccaggccaagaagcgggttctcgaacctctcggtctggttgaggaaggcgctaatacggctcctggaaagaaacgtccggtagagcagtcgccacaagagccagactcctccgcgggtattggcaaatcgggtgcacagcccgctaaaaagagactcaatttcggtcagactggcgacacagagtcagtcccagaccctcaaccaatcggagaacctcccgcagccccctcaggtgtgggatctcttacaatggcttcaggtggtggcgcaccagtggcagacaataacgaaggtgccgatggagtgggtagttcctcgggaaattggcattgcgattcccaatggctgggggacagagtcatcaccaccagcacccgaacctgggccctgcccacctacaacaatcacctctacaagcaaatctccaacagcacatctggaggatcttcaaatgacaacgcctacttcggctacagcaccccctgggggtattttgacttcaacagattccactgccacttctcaccacgtgactggcagcgactcatcaacaacaactggggattccggcctaagcgactcaacttcaagctcttcaacattcaggtcaaagaggttacggacaacaatggagtcaagaccatcgccaataacctcaccagcaccatccaggtgtttacggactcggagtaccagctgccgtacgttctcggctccgcccaccagggctgcctgcctccgttcccggcggacgtgttcatgattccccagtacggctacctaacactcaacaacggtagtcaggccgtgggacgctcctccttctactgcctggaatactttccttcgcagatgctgagaaccggcaacaacttccagtttacttacaccttcgaggacgtgcctttccacagcagctacgcccacagccagagcttggaccggctgatgaatcctctgattgaccagtacctgtactacttgtctcggactcaaacaacaggaggcacggcaaatacgcagactctgggcttcagccaaggtgggcctaatacaatggccaatcaggcaaagaactggctgccaggaccctgttaccgccaacaacgcgtctcaacgacaaccgggcaaaacaacaatagcaactttgcctggactgctgggaccaaataccatctgaatggaagaaattcattggctaatcctggcatcgctatggcctcacacaaagacgacaaggagcgtttttttcccagtaacgggatcctgatttttggcaaacaaaatgctgccagagacaatgcggattacagcgatgtcatgctcaccagcgaggaagaaatcaaaaccactaaccctgtggctacagaggaatacggtatcgtggcagataacttgcagcagcaaaacacggctcctcaaattggaactgtcaacagtcaaggagccttacctggcatggtctggcagaaccgggacgtgtacctgcagggtcccatctgggccaagattcctcacacggacggcaacttccacccgtctccgctgatgggcggctttggcctgaaacatcctccgcctcagatcctgatcaagaacacgcctgtacctgcggatcctccgaccaccttcaaccagtcaaagctgaactctttcatcacgcaatacagcaccggacaggtcagcgtggaaattgaatgggagctgcagaaggaaaacagcaagcgctggaaccccgagatccagtacaccaccaactactacaaatctacaagtgtggactttgctgttaatacagaaggcgtgtactctgaaccccaccccattggcacccgttacctcacccgtcccctgtaa

SEQ ID NO: 1000 - DNA, 2211 bp, Artificial Sequence
  source: /note="Description of Artificial Sequence: Synthetic polynucleotide"
atggctgccgatggttatcttccagattggctcgaggacaacctctctgagggcattcgcgagtggtgggcgctgaaacctggagccccgaagcccaaagccaaccagcaaaagcaggacgacggccggggtctggtgcttcctggctacaagtacctcggacccttcaacggactcgacaaaggagagccggtcaacgaggcggacgcggcagccctcgaacacgacaaagcttacgaccagcagctcaaggccggtgacaatccgtacctgcggtataaccacgccgacgccgagtttcaggagcgtcttcaagaagatacgtcttttgggggcaacctcgggcgagcagtcttccaggccaagaagcgggttctcgaacctctcggtctggttgaggaaggcgctaagacggctcctggaaagaaacgtccggtagagcagtcgccacaagagccagactcctcctcgggcatcggcaagacaggccagcagcccgctaaaaagagactcaattttggtcagactggcgactcagagtcagtccccgacccacaacctctcggagaacctccagcaacccccgctgctgtgggacctactacaatggcttcaggcggtggcgcaccaatggcagacaataacgaaggcgccgacggagtgggtaatgcctcaggaaattggcattgcgattccacatggctgggcgacagagtcatcaccaccagcacccgcacctgggccttgcccacctacaataaccacctctacaagcaaatctccagtgcttcaacgggggccagcaacgacaaccactacttcggctacagcaccccctgggggtattttgactttaacagattccactgccacttttcaccacgtgactggcaaagactcatcaacaacaactggggattccggcccaagagactcaacttcaagctcttcaacatccaggtcaaggaggtcacgcagaatgaaggcaccaagaccatcgccaataaccttaccagcacgattcaggtctttacggactcggaataccagctcccgtacgtcctcggctctgcgcaccagggctgcctccctccgttcccggcggacgtgttcatgattccgcagtacggctacctaacactcaacaacggtagtcaggccgtgggacgctcctccttctactgcctggaatactttccttcgcagatgctgagaaccggcaacaacttccagtttacttacaccttcgaggacgtgcctttccacagcagctacgcccacagccagagcttggaccggctgatgaatcctctgattgaccagtacctgtactacttgtctcggactcaaacaacaggaggcacggcaaatacgcagactctgggcttcagccaaggtgggcctaatacaatggccaatcaggcaaagaactggctgccaggaccctgttaccgccaacaacgcgtctcaacgacaaccgggcaaaacaacaatagcaactttgcctggactgctgggaccaaataccatctgaatggaagaaattcattggctaatcctggcatcgctatggcaacacacaaagacgacaaggagcgtttttttcccagtaacgggatcctgatttttggcaaacaaaatgctgccagagacaatgcggattacagcgatgtcatgctcaccagcgaggaagaaatcaaaaccactaaccctgtggctacagaggaatacggtatcgtggcagataacttgcagcagcaaaacacggctcctcaaattggaactgtcaacagccagggggccttacccggtatggtctggcagaaccgggacgtgtacctgcagggtcccatctgggccaagattcctcacacggacggcaacttccacccgtctccgctgatgggcggctttggcctgaaacatcctccgcctcagatcctgatcaagaacacgcctgtacctgcggatcctccgaccaccttcaaccagtcaaagctgaactctttcatcacgcaatacagcaccggacaggtcagcgtggaaattgaatgggagctgcagaaggaaaacagcaagcgctggaaccccgagatccagtacacctccaactactacaaatctacaagtgtggactttgctgttaatacagaaggcgtgtactctgaaccccaccccattggcacccgttacctcacccgtcccctgtaa

SEQ ID NO: 1001 - DNA, 2211 bp, Artificial Sequence
  source: /note="Description of Artificial Sequence: Synthetic polynucleotide"
atggctgccgatggttatcttccagattggctcgaggacaacctctctgagggcattcgcgagtggtgggcgctgaaacctggagccccgaagcccaaagccaaccagcaaaagcaggacgacggccggggtctggtgcttcctggctacaagtacctcggacccttcaacggactcgacaaaggagagccggtcaacgaggcggacgcggcagccctcgaacacgacaaagcttacgaccagcagctcaaagcgggtgacaatccgtacctgcggtataaccacgccgacgccgagtttcaggagcgtctgcaagaagatacgtcttttgggggcaacctcgggcgagcagtcttccaggccaagaagagggttctcgaaccttttggtctggttgaggaaggtgctaagacggctcctggaaagaaacgtccggtagagcagtcgccacaagagccagactcctcctcgggcattggcaagacaggccagcagcccgctaaaaagagactcaattttggtcagactggcgactcagagtcagtccccgacccacaacctctcggagaacctccagcaacccccgctgctgtgggacctactacaatggcttcaggcggtggcgcaccaatggcagacaataacgaaggcgccgacggagtgggtaatgcctcaggaaattggcattgcgattcccaatggctgggcgacagagtcatcaccaccagcaccagaacctgggccttgcccacctataacaaccacctctacaagcaaatctccagtgcttcaacgggggccagcaacgacaaccactacttcggctacagcaccccctgggggtattttgatttcaacagattccactgccacttctcaccacgtgactggcagcgactcatcaacaacaactggggattccggcctaagcgactcaacttcaagctcttcaacattcaggtcaaagaggttacggacaacaatggagtcaagaccatcgccaataaccttaccagcacggttcaagtcttctcggactcggagtaccagttgccgtacgtcctcggctctgcgcaccagggctgcctccctccgttcccggcggacgtgttcatgattccccagtacggctacctaacactcaacaacggtagtcaggccgtgggacgctcctccttctactgcctggaatactttccttcgcagatgctgagaaccggcaacaacttccagtttacttacaccttcgaggacgtgcctttccacagcagctacgcgcacagccagagcttggaccggctgatgaatcctctgattgaccagtacctgtactacttgtctcggactcaaacaacaggaggcacggcaaatacgcagactctgggcttcagccaaggtgggcctaatacaatggccaatcaggcaaagaactggctgccaggaccctgttaccgccaacaacgcgtctcaacgacaaccgggcaaaacaacaatagcaactttgcctggactgctgggaccaaataccatctgaatggaagaaattcattggctaatcctggcatcgctatggcaacacacaaagacgacaaggagcgtttttttcccagtaacgggatcctgatttttggcaaacaaaatgctgccagagacaatgcggattacagcgatgtcatgctcaccagcgaggaagaaatcaaaaccactaaccctgtggctacagaggaatacggtatcgtggcagataacttgcagcagcaaaacacggctcctcaaattggaactgtcaacagccagggggccttacccggtatggtctggcagaaccgggacgtgtacctgcagggtcccatctgggccaagattcctcacacggacggcaacttccacccgtctccgctgatgggcggctttggcctgaaacatcctccgcctcagatcctgatcaagaacacgcctgtacctgcggatcctccgaccaccttcaaccagtcaaagctgaactctttcatcacgcaatacagcaccggacaggtcagcgtggaaattgaatgggagctgcagaaggaaaacagcaagcgctggaaccccgagatccagtacacctccaactactacaaatctacaagtgtggactttgctgttaatacagaaggcgtgtactctgaaccccaccccattggcacccgttacctcacccgtcccctgtaa

SEQ ID NO: 1002 - DNA, 2244 bp, Artificial Sequence
  source: /note="Description of Artificial Sequence: Synthetic polynucleotide"
  modified_base (2241)..(2241): a, c, t, or g
atggctgccgatggttatcttccagattggctcgaggacactctctctgaaggaataagacagtggtggaagctcaaacctggcccaccaccaccaaagcccgcagagcggcataaggacgacagcaggggtcttgtgcttcctgggtacaagtacctcggacccttcaacggactcgacaagggagagccggtcaacgaggcagacgccgcggccctcgagcacgacaaagcctacgaccggcagctcgacagcggagacaacccgtacctcaagtacaaccacgccgacgcggagtttcaggagcgccttaaagaagatacgtcttttgggggcaacctcgggcgagcagtcttccaggccaagaagagggttctcgaaccttttggtctggttgaggaaggtgctaagacggctcctggaaagaaacgtccggtagagcagtcgccacaagagccagactcctcctcgggcattggcaagacaggccagcagcccgctaaaaagagactcaattttggtcagactggcgactcagagtcagtccccgacccacaacctctcggagaacctccagcaacccccgctgctgtgggacctactacaatggcttcaggcggtggcgcaccaatggcagacaataacgaaggcgccgacggagtgggtaatgcctcaggaaattggcattgcgattccacatggctgggcgacagagtcatcaccaccagcacccgaacatgggccttgcccacctataacaaccacctctacaagcaaatctccagtgcttcaacgggggccagcaacgacaaccactacttcggctacagcaccccctgggggtattttgacttcaacagattccactgccacttctcaccacgtgactggcagcgactcatcaacaacaactggggattccggcctaagcgactcaacttcaagctcttcaacattcaggtcaaagaggttacggacaacaatggagtcaagaccatcgccaataaccttaccagcacggtccaggtcttcacggactcagactatcagctcccgtacgtgctcgggtcggctcacgagggctgcctcccgccgttcccagcggacgttttcatgattcctcagtacggctacctaacactcaacaacggtagtcaggccgtgggacgctcctccttctactgcctggaatactttccttcgcagatgctgagaaccggcaacaacttccagtttacttacaccttcgaggacgtgcctttccacagcagctacgcgcacagccagagcttggaccggctgatgaatcctctgattgaccagtacctgtactacttgtctcggactcaaacaacaggaggcacggcaaatacgcagactctgggcttcagccaaggtgggcctaatacaatggccaatcaggcaaagaactggctgccaggaccctgttaccgccaacaacgcgtctcaacgacaaccgggcaaaacaacaatagcaactttgcctggactgctgggaccaaataccatctgaatggaagaaattcattggctaatcctggcatcgctatggcaacacacaaagacgacaaggagcgtttttttcccagtaacgggatcctgatttttggcaaacaaaatgctgccagagacaatgcggattacagcgatgtcatgctcaccagcgaggaagaaatcaaaaccactaaccctgtggctacagaggaatacggtatcgtggcagataacttgcagcagcaaaacacggctcctcaaattggaactgtcaacagccagggggccttacccggtatggtctggcagaaccgggacgtgtacctgcagggtcccatctgggccaagattcctcacacggacggcaacttccacccgtctccgctgatgggcggctttggcctgaaacatcctccgcctcagatcctgatcaagaacacgcctgtacctgcggatcctccgaccaccttcaaccagtcaaagctgaactctttcatcacgcaatacagcaccggacaggtcagcgtggaaattgaatgggagctgcagaaggaaaacagcaagcgctggaaccccgagatccagtacacctccaactactacaaatctacaagtgtggactttgctgttaatacagaaggcgtgtactctgaaccccaccccattggcaccagatacctgactcgtaatctgtaattgcttgttaatcaataaaccgtttaattnttt

SEQ ID NO: 1003 - DNA, 2217 bp, Artificial Sequence
  source: /note="Description of Artificial Sequence: Synthetic polynucleotide"
atggctgccgatggttatcttccagattggctcgaggacaacctctctgagggcattcgcgagtggtgggacttgaaacctggagccccgaaacccaaagccaaccagcaaaagcaggacgacggccggggtctggtgcttcctggctacaagtacctcggacccttcaacggactcgacaagggggagcccgtcaacgcggcggacgcagcggccctcgagcacgacaaggcctacgaccagcagctccaagcgggtgacaatccgtacctgcggtataaccacgccgacgccgagtttcaggagcgtctgcaagaagatacgtcttttgggggcaacctcggacgagcagtcttccaggcgaaaaagagggttctcgaacctctcggtctggttgaggaaggcgctaagacggctcctggaaagaagagaccggtagagccatcaccccagcgttctccagactcctctacgggcatcggcaagaaaggccaacagcccgccagaaaaagactcaattttggtcagactggcgactcagagtcagttccagaccctcaacctctcggagaacctccagcagcgccctctggtgtgggacctaatacaatggctgcaggcggtggcgcaccaatggcagacaataacgaaggcgccgacggagtgggtagttcctcgggaaattggcattgcgattcccaatggctgggggacagagtcatcaccaccagcacccgaacctgggccctgcccacctacaacaatcacctctacaagcaaatctccaacagcacatctggaggatcttcaaatgacaacgcctacttcggctacagcaccccctgggggtattttgacttcaaccgcttccactgccacttctcaccacgtgactggcagcgactcatcaacaacaactggggattccggcccaagagactcagcttcaaactcttcaacatccaggtcaaggaggtcacgcagaatgaaggcaccaagaccatcgccaataacctcaccagcaccatccaggtgtttacggactcggagtaccagctgccgtacgttctcggctctgcccaccagggctgcctgcctccgttcccggcggacgtgttcatgattcctcagtacggctacctaacgctcaacaatggcagccaggcagtgggacggtcatccttttactgcctggaatatttcccatcgcagatgctgagaacgggcaacaactttaccttcagctacacctttgaggacgttcctttccacagcagctacgctcacagccagagtctggaccgtctcatgaatcctctgattgaccagtacctgtactacttgtctcggactcaaacaacaggaggcacggcaaatacgcagactctgggcttcagccaaggtgggcctaatacaatggccaatcaggcaaagaactggctgccaggaccctgttaccgccaacaacgcgtctcaacgacaaccgggcaaaacaacaatagcaactttgcctggactgctgggaccaaataccatctgaatggaagaaattcattggctaatcctggcatcgctatggcaacacacaaagacgacaaggagcgtttttttcccagtaacgggatcctgatttttggcaaacaaaatgctgccagagacaatgcggattacagcgatgtcatgctcaccagcgaggaagaaatcaaaaccactaaccctgtggctacagaggaatacggtatcgtggcagataacttgcagcagcaaaacacggctcctcaaattggaactgtcaacagccagggggccttacccggtatggtctggcagaaccgggacgtgtacctgcagggtcccatctgggccaagattcctcacacggacggcaacttccacccgtctccgctgatgggcggctttggacttaagcacccgcctcctcagatcctcatcaaaaacacgcctgttcctgcggatcctccgaccaccttcaaccagtcaaagctgaactctttcatcacgcaatacagcaccggacaggtcagcgtggaaattgaatgggagctgcagaaggaaaacagcaagcgctggaaccccgagatccagtacacctccaactactacaaatctacaagtgtggactttgctgttaatacagaaggcgtgtactctgaaccccaccccattggcacccgttacctcacccgtcccctgtaa

SEQ ID NO: 1004 - DNA, 2214 bp, Artificial Sequence
  source: /note="Description of Artificial Sequence: Synthetic polynucleotide"
atggctgccgatggttatcttccagattggctcgaggacaacctctctgagggcattcgcgagtggtgggacttgaaacctggagccccgaagcccaaagccaaccagcaaaagcaggacgacggccggggtctggtgcttcctggctacaagtacctcggacccttcaacggactcgacaagggggagcccgtcaacgcggcggatgcagcggccctcgagcacgacaaagcctacgaccagcagctcaaagcgggtgacaatccgtacctgcggtataaccacgccgacgccgagtttcaggagcgtctgcaagaagatacgtcttttgggggcaacctcgggcgagcagtcttccaggccaagaagagggttctcgaaccttttggtctggttgaggaaggtgctaagacggctcctggaaagaaacgtccggtagagcagtcgccacaagagccagactcctcctcgggcattggcaagacaggccagcagcccgctaaaaagagactcaattttggtcagactggcgactcagagtcagtccccgacccacaacctctcggagaacctccagcaacccccgctgctgtgggacctactacaatggcttcaggcggtggcgcacccatgcaagacaataacgaaggcgccgacggagtgggtagttcctcgggaaattggcattgcgattccacatggctgggcgacagagtcatcaccaccagcacccgaacctgggccctgcccacctacaacaaccacctctacaagcaaatctccaacgggacatcgggaggagccaccaacgacaacacctacttcggctacagcaccccctgggggtattttgactttaacagattccactgccacttttcaccacgtgactggcagcgactcatcaacaacaactggggattccggcccaagagactcaacttcaagctcttcaacatccaggtcaaggaggtcacgcagaatgaaggcaccaagaccatcgccaataaccttaccagcacgattcaggtctttacggattcggaataccagctcccgtacgtcctcggctctgcgcaccagggctgcctccctccgttcccggcggacgtgttcatgattccgcagtacggctacctaacgctcaacaatggtagccaggcagtgggacggtcatccttttactgcctggaatatttcccatcgcagatgctgagaacgggcaacaactttaccttcagctacacctttgaggacgttcctttccacagcagctacgctcacagccagagtctggaccgtctcatgaatcctctgattgaccagtacctgtactacttgtctcggactcaaacaacaggaggcacggcaaatacgcagactctgggcttcagccaaggtgggcctaatacaatggccaatcaggcaaagaactggctgccaggaccctgttaccgccaacaacgcgtctcaacgacaaccgggcaaaacaacaatagcaactttgcctggactgctgggaccaaataccatctgaatggaagaaattcattggctaatcctggcatcgctatggcaacacacaaagacgacaaggagcgtttttttcccagtaacgggatcctgatttttggcaaacaaaatgctgccagagacaatgcggattacagcgatgtcatgctcaccagcgaggaagaaatcaaaaccactaaccctgtggctacagaggaatacggtatcgtggcagataacttgcagcagcaaaacacggctcctcaaattggaactgtcaacagccagggggccttacccggtatggtctggcagaaccgggacgtgtacctgcagggtcccatctgggccaagattcctcacacggacggcaacttccacccgtctccgctgatgggcggctttggcctgaaacatcctccgcctcagatcctgatcaagaacacgcctgtacctgcggatcctccgaccaccttcaaccagtcaaagctgaactctttcatcacgcaatacagcaccggacaggtcagcgtggaaattgaatgggagctgcagaaggaaaacagcaagcgctggaaccccgagatccagtacacctccaactactacaaatctacaagtgtggactttgctgttaatacagaaggcgtgtactctgaaccccaccccattggcacccgttacctcacccgtcccctgtaa

SEQ ID NO: 1005 - DNA, 2211 bp, Artificial Sequence
  source: /note="Description of Artificial Sequence: Synthetic polynucleotide"
atggctgccgatggttatcttccagattggctcgaggacaacctctctgagggcattcgcgagtggtgggcgctgaaacctggagccccgaagcccaaagccaaccagcaaaagcaggacgacggccggggtctggtgcttcctggctacaagtacctcggacccttcaacggactcgacaagggggagcccgtcaacgcggcggacgcagcggccctcgagcacgacaaggcctacgaccagcagctcaaagcgggtgacaatccgtacctgcggtataaccacgccgacgccgagtttcaggagcgtctgcaagaagatacgtcttttgggggcaacctcgggcgagcagtcttccaggccaagaagcgggttctcgaacctctcggtctggttgaggaaggcgctaagacggctcctggaaagaaacgtccggtagagcagtcgccacaagagccagactcctcctcgggcatcggcaagacaggccagcagcccgctaaaaagagactcaattttggtcagactggcgactcagagtcagtccccgacccacaacctctcggagaacctccagcaacccccgctgctgtgggacctactacaatggcttcaggcggtggcgcaccaatggcagacaataacgaaggcgccgacggagtgggtagttcctcgggaaattggcattgcgattccacatggctgggcgacagagtcatcaccaccagcacccgcacctgggccttgcccacctacaataaccacctctacaagcaaatctccagtgcttcaacgggggccagcaacgacaaccactacttcggctacagcaccccctgggggtattttgacttcaacagattccactgccacttctcaccacgtgactggcagcgactcatcaacaacaactggggattccggcctaagcgactcaacttcaagctcttcaacattcaggtcaaagaggttacggacaacaatggagtcaagaccatcgccaataaccttaccagcacggtccaggtcttcacggactcagactatcagctcccgtacgtgctcgggtcggctcacgagggctgcctcccgccgttcccagcggacgttttcatgattcctcagtacgggtatctgacgctcaacaatggcagccaggcagtgggacggtcatccttttactgcctggaatatttcccatcgcagatgctgagaacgggcaataactttaccttcagctacaccttcgaggacgtgcctttccacagcagctacgcgcacagccagagcctggaccggctgatgaatcctctgattgaccagtacctgtactacttgtctcggactcaaacaacaggaggcacggcaaatacgcagactctgggcttcagccaaggtgggcctaatacaatggccaatcaggcaaagaactggctgccaggaccctgttaccgccaacaacgcgtctcaacgacaaccgggcaaaacaacaatagcaactttgcctggactgctgggaccaaataccatctgaatggaagaaattcattggctaatcctggcatcgctatggcaacacacaaagacgacaaggagcgtttttttcccagtaacgggatcctgatttttggcaaacaaaatgctgccagagacaatgcggattacagcgatgtcatgctcaccagcgaggaagaaatcaaaaccactaaccctgtggctacagaggaatacggtatcgtggcagataacttgcagcagcaaaacacggctcctcaaattggaactgtcaacagccagggggccttacccggtatggtctggcagaaccgggacgtgtacctgcagggtcccatctgggccaagattcctcacacggacggcaacttccacccgtctccgctgatgggcggctttggcctgaaacatcctccgcctcagatcctgatcaagaacacgcctgtacctgcggatcctccgaccaccttcaaccagtcaaagctgaactctttcatcacgcaatacagcaccggacaggtcagcgtggaaattgaatgggagctgcagaaggaaaacagcaagcgctggaaccccgagatccagtacacctccaactactacaaatctacaagtgtggactttgctgttaatacagaaggcgtgtactctgaaccccaccccattggcacccgttacctcacccgtcccctgtaa

SEQ ID NO: 1006 - DNA, 2214 bp, Artificial Sequence
  source: /note="Description of Artificial Sequence: Synthetic polynucleotide"
atggctgccgatggttatcttccagattggctcgaggacaacctctctgagggcattcgcgagtggtgggacttgaaacctggagccccgaaacccaaagccaaccagcaaaagcaggacgacggccggggtctggtgcttcctggctacaagtacctcggacccttcaacggactcgacaagggggagcccgtcaacgcggcggatgcagcggccctcgagcacgacaaggcctacgaccagcagctcaaagcgggtgacaatccgtacctgcggtataaccacgccgacgccgagtttcaggagcgtctgcaagaagatacgtcttttgggggcaacctcgggcgagcagtcttccaggccaagaagcgggttctcgaacctctcggtctggttgaggaaggcgctaagacggctcctggaaagaagagaccggtagagccatcaccccagcgttctccagactcctctacgggcatcggcaagaaaggccaacagcccgccagaaaaagactcaattttggtcagactggcgactcagagtcagtccccgacccacaacctctcggagaacctccagcaacccccgctgctgtgggacctactacaatggcttcaggcggtggcgcaccaatggcagacaataacgaaggcgccgacggagtgggtaatgcctcaggaaattggcattgcgattccacatggctgggcgacagagtcatcaccaccagcacccgaacatgggccttgcccacctataacaaccacctctacaagcaaatctccagtgcttcaacgggggccagcaacgacaaccactacttcggctacagcaccccctgggggtattttgatttcaacagattccactgccatttctcaccacgtgactggcagcgactcatcaacaacaatttgggatcccggcccaagagactcaacttcaagctcttcatcatccaagtcaaggaggtcacgacgaatgatggcgtcacgaccatcgctaataaccttaccagcacggttcaagtcttctcggactcggagtaccagttgccgtacgtcctcggctctgcgcaccagggctgcctccctccgttcccggcggacgtgttcatgattccgcagtacggctacctaacgctcaacaatggcagccaggcagtgggacggtcatccttttactgcctggaatatttcccatcgcagatgctgagaacgggcaataactttaccttcagctacaccttcgaggacgtgcctttccacagcagctacgcgcacagccagagcctggaccggctgatgaatcctctcatcgaccagtacctgtattacctgaacagaactcagaatcagtccggaagtgcccaaaacaaggacttgctgtttagccgggggtctccagctggcatgtctgttcagcccaaaaactggctacctggaccctgttaccggcagcagcgcgtttctaaaacaaaaacagacaacaacaacagcaactttacctggactggtgcttcaaaatataaccttaatgggcgtgaatctataatcaaccctggcactgctatggcctcacacaaagacgacaaagacaagttctttcccatgagcggtgtcatgatttttggaaaggagagcgccggagcttcaaacactgcattggacaatgtcatgatcacagacgaagaggaaatcaaagccactaaccccgtggccaccgaaagatttgggactgtggcagtcaatctccagagcagcagcacagaccctgcgaccggagatgtgcatgttatgggagccttacctggaatggtgtggcaagacagagacgtatacctgcagggtcctatttgggccaaaattcctcacacggatggacactttcacccgtctcctctcatgggcggctttggacttaagcacccgcctcctcagatcctcatcaaaaacacgcctgttcctgcgaatcctccggcagagttttcggctacaaagtttgcttcattcatcacccagtattccacaggacaagtgagcgtggagattgaatgggagctgcagaaagaaaacagcaaacgctggaatcccgaagtgcagtatacatctaactatgcaaaatctgccaacgttgatttcactgtggacaacaatggactttatactgagcctcgccccattggcacccgttacctcacccgtcccctgtaa

SEQ ID NO: 1007 - DNA, 2211 bp, Artificial Sequence
  source: /note="Description of Artificial Sequence: Synthetic polynucleotide"
atggctgccgatggttatcttccagattggctcgaggacaacctctctgagggcattcgcgagtggtgggcgctgaaacctggagccccgaaacccaaagccaaccagcaaaagcaggacgacggccggggtctggtgcttcctggctacaagtacctcggacccttcaacggactcgacaagggggagcccgtcaacgcggcggacgcagcggccctcgagcacgacaaggcctacgaccagcagctcaaggcgggtgacaatccgtacctgcggtataaccacgccgacgccgagtttcaggagcgtctgcaagaagatacgtcttttgggggcaacctcgggcgagcagtcttccaggccaaaaagaggcttcttgaacctcttggtctggttgaggaagcggctaagacggctcctggaaagaaacgtccggtagagcagtcgccacaagagccagactcctcctcgggcattggcaagacaggccagcagcccgctaaaaagagactcaactttgggcagactggcgactcagagtcagtgcccgaccctcaaccaatcggagaacctccagcaacccccgctgctgtgggacctactacaatggcttcaggcggtggcgcaccaatggcggacaataacgaaggcgccgatggagtgggtaattcctcgggaaattggcattgcgattccacatggctgggcgacagagtcatcaccaccagcacccgaacctgggccctgcccacctacaacaatcacctctacaagcaaatctccagtgcttcaacgggggccagcaacgacaaccactacttcggctacagcaccccctgggggtattttgatttcaacagattccactgccacttttcaccacgtgactggcagcgactcatcaacaacaactggggattccggcccaagagactcaacttcaagctcttcaacatccaggtcaaggaggtcacgcagaatgaaggcaccaagaccatcgccaataacctcaccagcaccatccaggtgtttacggactcggagtaccagctgccgtacgttctcggctccgcccaccagggctgcctgcctccgttcccggcggacgtgttcatgattccgcagtacggctacctaacgctcaacaatggcagccaggcagtgggacggtcatccttttactgcctggaatatttcccatcgcagatgctgagaacgggcaacaactttaccttcagctacacctttgaggacgttcctttccacagcagctacgctcacagccagagtctggaccgtctcatgaatcctctgattgaccagtacctgtactacttgtctcggactcaaacaacaggaggcacggcaaatacgcagactctgggcttcagccaaggtgggcctaatacaatggccaatcaggcaaagaactggctgccaggaccctgttaccgccaacaacgcgtctcaacgacaaccgggcaaaacaacaatagcaactttgcctggactgctgggaccaaataccatctgaatggaagaaattcattggctaatcctggcatcgctatggcaacacacaaagacgacaaggagcgtttttttcccagtaacgggatcctgatttttggcaaacaaaatgctgccagagacaatgcggattacagcgatgtcatgctcaccagcgaggaagaaatcaaaaccactaaccctgtggctacagaggaatacggtatcgtggcagataacttgcagcagcaaaacacggctcctcaaattggaactgtcaacagccagggggccttacccggtatggtctggcagaaccgggacgtgtacctgcagggtcccatctgggccaagattcctcacacggacggcaacttccacccgtctccgctgatgggcggctttggcctgaaacatcctccgcctcagatcctgatcaagaacacgcctgtacctgcggatcctccgaccaccttcaaccagtcaaagctgaactctttcatcacgcaatacagcaccggacaggtcagcgtggaaattgaatgggagctgcagaaggaaaacagcaagcgctggaaccccgagatccagtacacctccaactactacaaatctacaagtgtggactttgctgttaatacagaaggcgtgtactctgatccccaccccattggcacccgttacctcacccgtcccctgtaa

SEQ ID NO: 1008 - DNA, 2211 bp, Artificial Sequence
  source: /note="Description of Artificial Sequence: Synthetic polynucleotide"
atggctgccgatggttatcttccagattggctcgaggacaacctctctgagggcattcgcgagtggtgggcgctgaaacctggagccccgaagcccaaagccaaccagcaagagcaggacgacggccggggtctggtgcttcctggctacaagtacctcggacccttcaacggactcgacaagggagagcccgtcaacgcggcggatgcagcggccctcgagcacgacaaagcctacgaccagcagctcaaagcgggtgacaatccgtacctgcggtataaccacgccgacgccgagtttcaggagcgtctgcaagaagatacgtcttttgggggcaacctcgggcgagcagtcttccaggccaagaagagggttctcgaaccttttggtctggttgaggaaggtgctaagacggctcctggaaagaaacgtccggtagagcagtcgccacaagagccagactcctcctcgggcattggcaagacaggccagcagcccgctaaaaagagactcaattttggtcagactggcgactcagagtcagttccagaccctcaacctctcggagaacctccagcagcgccctctggtgtgggacctaatacaatggctgcaggcggtggcgcaccaatggcagacaataacgaaggcgccgacggagtgggtagttcctcgggaaattggcattgcgattccacatggctgggcgacagagtcatcaccaccagcacccgaacctgggccctgcccacctacaacaaccacctctacaagcaaatctccagtgcttcaacgggggccagcaacgacaaccactacttcggctacagcaccccctgggggtattttgactttaacagattccactgccacttttcaccacgtgactggcagcgactcatcaacaacaactggggattccggcccaagagactcaacttcaagctcttcaacatccaggtcaaggaggtcacgcagaatgaaggcaccaagaccatcgccaataaccttaccagcacgattcaggtctttacggattcggaataccagctcccgtacgtcctcggctctgcgcaccagggctgcctccctccgttcccggcggacgtgttcatgattccgcagtacggctacctaacgctcaacaatggtagccaggcagtgggacggtcatcctttttctgcctggaatatttcccatcgcagatgctgagaacgggcaacaactttaccttcagctacacctttgaggacgttcctttccacagcagctacgctcacagccagagtctggaccgtctcatgaatcctctgattgaccagtacctgtactacttgtctcggactcaaacaacaggaggcacggcaaatacgcagactctgggcttcagccaaggtgggcctaatacaatggccaatcaggcaaagaactggctgccaggaccctgttaccgccaacaacgcgtctcaacgacaaccgggcaaaacaacaatagcaactttgcctggactgctgggaccaaataccatctgaatggaagaaattcattggctaatcctggcatcgctatggcaacacacaaagacgacaaggagcgtttttttcccagtaacgggatcctgatttttggcaaacaaaatgctgccagagacaatgcggattacagcgatgtcatgctcaccagcgaggaagaaatcaaaaccactaaccctgtggctacagaggaatacggtatcgtggcagataacttgcagcagcaaaacacggctcctcaaattggaactgtcaacagccagggggccttacccggtatggtctggcagaaccgagacgtgtacctgcagggtcccatctgggccaagattcctcacacggacggcaacttccacccgtctccgctgatgggcggctttggcctgaaacatcctccgcctcagatcctgatcaagaacacgcctgtacctgcggatcctccgaccaccttcaaccagtcaaagctgaactctttcatcacgcaatacagcaccggacaggtcagcgtggaaattgaatgggagctgcagaaggaaaacagcaagcgctggaaccccgagatccagtacacctccaactactacaaatctacaagtgtggactttgctgttaatacagaaggcgtgtactctgaaccccaccccattggcacccgttacctcacccgtcccctgtaa

SEQ ID NO: 1009 - DNA, 2211 bp, Artificial Sequence
  source: /note="Description of Artificial Sequence: Synthetic polynucleotide"
atggctgccgatggttatcttccagattggctcgaggacaacctctctgagggcattcgcgagtggtgggacttgaaacctggagccccgaagcccaaagccaaccagcaaaagcaggacgacggccggggtctggtgcttcctggctacaagtacctcggacccttcaacggactcgacaagggggagcccgtcaacgcggcggacgcagcggccctcgagcacgacaaggcctacgaccagcagctcaaagcgggtgacaatccgtacctgcggtataaccacgccgacgccgagtttcaggagcgtctgcaagaagatacgtcttttgggggcaacctcgggcgagcagtcttccaggccaagaagcgggttctcgaacctctcggtctggttgaggaaggcgctaagacggctcctggaaagaaacgtccggtagagcagtcaccacaagagccagactcctcctcgggcatcggcaagacaggccagcagcccgctaaaaagagactcaattttggtcagactggcgactcagagtcagtccccgacccacaacctctcggagaacctccagcaacccccgctgctgtgggacctactacaatggcttcaggcggtggcgcaccaatggcggacaataacgaaggcgccgacggagtgggtaatgcctcaggaaattggcattgcgattccacatggctgggcgacagagtcatcaccaccagcacccgaacatgggccttgcccacctataacaaccacctctacaagcaaatctccagtgcttcaacgggggccagcaacgacaaccactacttcggctacagcaccccctgggggtattttgatttcaacagattccactgccatttctcaccacgtgactggcagcgactcatcaacaacaattggggattccggcccaagagactcaacttcaagctcttcaacatccaagtcaaggaggtcacgacgaatgatggcgtcacgaccatcgctaataaccttaccagcacggttcaagtcttctcggactcggagtaccagttgccgtacgtcctcggctctgcgcaccagggctgcctccctccgttcccggcggacgtgttcatgattccgcagtacggctacctaacgctcaacaatggcagccaggcagtgggacggtcatccttttactgcctggaatatttcccatcgcagatgctgagaacgggcaataactttaccttcagctacaccttcgaggacgtgcctttccacagcagctacgcgcacagccagagcctggaccggctgatgaatcctctcatcgaccagtacctgtattacctgaacagaactcagaatcagtccggaagtgcccaaaacaaggacttgctgtttagccgggggtctccagctggcatgtctgttcagcccaaaaactggctacctggaccctgttaccggcagcagcgcgtttctaaaacaaaaacagacaacaacaacagcaactttacctggacaggtgcttcaaaatataaccttaatgggcgtgaatctataatcaaccctggcactgctatggcctcacacaaagacgacaaagacaagttctttcccatgagcggtgtcatgatttttggaaaggagagcgccggagcttcaaacactgcattggacaatgtcatgatcacagacgaagaggaaatcaaagccactaaccccgtggccaccgaaagatttgggactgtggcagtcaatctccagaacagcagcacagaccctgcgaccggagatgtgcatgttatgggagccttacctggaatggtgtggcaagacagagacgtatacctgcagggtcctatttgggccaaaattcctcacacggatggacactttcacccgtctcctctcatgggcggctttggacttaagcacccgcctcctcagatcctcatcaaaaacacgcctgttcctgcgaatcctccggcagagttttcggctacaaagtttgcttcattcatcacccagtattccacaggacaagtgagcgtggagattgaatgggagctgcagaaagaaaacagcaaacgctggaatcccgaagtgcagtatacatctaactatgcaaaatctgccaacgttgatttcactgtagacaacaatggactttatactgtgcctcgccccattggcacccgttacctcacccgtcccctgtaa

SEQ ID NO: 1010 - DNA, 2211 bp, Artificial Sequence
  source: /note="Description of Artificial Sequence: Synthetic polynucleotide"
atggctgccgatggttatcttccagattggctcgaggacaacctctctgagggcattcgcgagtggtgggcgctgaaacctggagccccgaagcccaaagccaaccagcaaaagcaggacgacggccggggtctggtgcttcctggctacaagtacctcggacccttcaacggactcgacaaaggagagccggtcaacgcggcggacgcggcggccctcgaacacgacaaggcttacgaccagcagctcaaggcgggtgacaacccctacctgcggtataaccacgccgacgccgagttccaggagcggctgcaagaagatacgtcttttgggggcaacctcgggcgagcagtcttccaggccaaaaagaggcttcttgaacctcttggtctggttgaggaaggcgctaagacggctcctggaaagaagaggcctgtagagcagtctcctcaagaaccggactcctcctcgggtattggcaaaacaggtgagcagcccgctaaaaagagactcaattttggtcagactggcgactcagagtcagtccccgacccacaacctctcggagaacctccagcaacccccgctgctgtgggacctactacaatggcttcaggcggtggcgcaccaatggcagacaataacgaaggcgccgacggagtgggtagtgcctcaggaaattggcattgcgattccacatggctgggcgacagagtcatcaccaccagcacccgaacctgggccctgcccacctataacaaccatctctacaagcaaatctccagtgcttcaacgggggccagcaacgacaaccactacttcggctacagcaccccctgggggtattttgacttcaacagattccactgccacttctcaccacgtgactggcagcgactcatcaacaacaactggggattccggcctaagcgactcaacttcaagctcttcaacattcaggtcaaagaggttacggacaacaatggagtcaagaccatcgccaataacctcaccagcaccatccaggtgttcacggactcagagtatcagctgccgtacgtgctcgggtcggctcaccagggctgcctccctccgttcccagcggacgtgttcatgattcctcagtacgggtatctgacactcaacaacggcagtcaggcagtgggacggtcatccttctactgcctggaatattttccatcgcagatgctgagaaccggcaacaactttccgttcagttacaccttcgaggacgtgcctttccacagcagctacgcgcacagccagagcctggaccggctgatgaatcctctgattgaccagtacctgtactacttgtctcggactcaaacaacaggaggcacggcaaatacgcagactctgggcttcagccaaggtgggcctaatacaatggccaatcaggcaaagaactggctgccaggaccctgttaccgccaacaacgcgtctcaacgacaaccgggcaaaacaacaatagcaactttgcctggactgctgggaccaaataccatctgaatggaagaaattcattggctaatcctggcatcgctatggcaacacacaaagacgacaaggagcgtttttttcccagtaacgggatcctgatttttggcaaacaaaatgctgccagagacaatgcggattacagcgatgtcatgctcaccagcgaggaagaaatcaaaaccactaaccctgtggctacagaggaatacggtatcgtggcagataacttgcagcagcaaaacacggctcctcaaattggaactgtcaacagccagggggccttacccggtatggtctggcagaaccgggacgtgtacctgcagggtcccatctgggccaagattcctcacacggacggcaacttccacccgtctccgctgatgggcggctttggcctgaaacatcctccgcctcagatcctgatcaagaacacgcctgtacctgcggatcctccgaccaccttcaaccagtcaaagctgaactctttcatcacgcaatacagcaccggacaggtcagcgtggaaattgaatgggagctgcagaaggaaaacagcaagcgctggaaccccgagatccagtacacctccaactactacaaatctacaagtgtggactttgctgttaatacagaaggcgtgtactctgaaccccaccccattggcacccgttacctcacccgtcccctgtaa

SEQ ID NO: 1011 - DNA, 2211 bp, Artificial Sequence
  source: /note="Description of Artificial Sequence: Synthetic polynucleotide"
atggctgccgatggttatcttccagattggctcgaggacaacctctctgagggcattcgcgagtggtgggcgctgaaacctggagccccgaagcccaaagccaaccagcaaaagcaggacgacggccggggtctggtgcttcctggctacaagtacctcggacccttcaacggactcgacaagggggagcccgtcaacgcggcggacgcagcggccctcgagcacgacaaggcctacgaccagcagctcaaagcgggtgacaatccgtacctgcggtataaccacgccgacgccgagtttcaggagcgtctgcaagaagatacgtcttttgggggcaacctcgggcgagcagtcttccaggccaagaagcgggttctcgaacctctcggtctggttgaggaaggcgctaagacggctcctggaaagaaacgtccggtagaacagtcgccacaagagccagactcctcctcgggcatcggcaagacaggccagcagcccgctaaaaagagactcaattttggtcagactggcgactcagagtcagtccccgatccacaacctctcggagaacctccagcaacccccgctgctgtgggacctactacaatggcttcaggcggtggcgcaccaatggcagacaataacgaaggcgccgacggagtgggtagttcctcgggaaattggcattgcgattcccaatggctgggggacagagtcatcaccaccagcacccgaacctgggccctgcccacctacaacaaccacctctacaagcaaatctccagtgcttcaacgggggccagcaacgacaaccactacttcggctacagcaccccctgggggtattttgatttcaacagattccactgccatttctcaccacgtgactggcagcgactcatcaacaacaactggggattccggcctaagcgactcaacttcaagctcttcaacattcaggtcaaagaggttacggacaacaatggagtcaagaccatcgccaataaccttaccagcacggtccaggtcttcacggactcggagtaccagttgccgtacgtcctcggctctgcgcaccaggactgcctccctccgttcccggcggacgtgttcatgattccgcagtacggctacctaacgctcaacaatggcagccaggcagtgggacggtcatccttttactgcctggaatatttcccatcgcagatgctgagaacgggcaacaactttaccttcagctacacctttgaggacgttcctttccacagcagctacgctcacagccagagtctggaccgtctcatgaatcctctgattgaccagtacctgtactacttgtctcggactcaaacaacaggaggcacggcaaatacgcagactctgggcttcagccaaggtgggcctaatacaatggccaatcaggcaaagaactggctgccaggaccctgttaccgccaacaacgcgtctcaacgacaaccggacaaaacaacaatagcaactttgcctggactgctgggaccaaataccatctgaatggaagaaattcattggctaatcctggcatcgctatggcaacacacaaagacgacaaggagcgtttttttcccagtaacgggatcctgatttttggcaaacaaaatgctgccagagacaatgcggattacagcgatgtcatgctcaccagcgaggaagaaatcaaaaccactaaccctgtggctacagaggaatacggtatcgtggcagataacttgcagcagcaaaacacggctcctcaaattggaactgtcaacagccagggggccttacccggtatggtctggcagaaccgggacgtgtacctgcagggtcccatctgggccaagattcctcacacggacggcaacttccacccgtctccgctgatgggcggctttggcctgaaacatcctccgcctcagatcctgatcaagaacacgcctgtacctgcggatcctccgaccaccttcaaccagtcaaagctgaactctttcatcacgcaatacagcaccggacaggtcagcgtggaaattgaatgggagctgcagaaggaaaacagcaagcgctggaaccccgagatccagtacacctccaactactacaaatctacaagtgtggactttgctgttaatacagaaggcgtgtactctgaaccccaccccattggcacccgttacctcacccgtcccctgtaa

SEQ ID NO: 1012 - DNA, 2211 bp, Artificial Sequence
  source: /note="Description of Artificial Sequence: Synthetic polynucleotide"
atggctgccgatggttatcttccagattggctcgaggacaacctctctgagggcattcgcgagtggtgggacttgaaacctggagccccgaagcccaaagccaaccagcaaaagcaggacgacggccggggtctggtgcttcctggctacaagtacctcggacccttcaacggactcgacaagggggagcccgtcaacgcggcggacgcagcggccctcgagcacgacaaggcctacgaccagcagctcaaagcgggtgacaatccgtacctgcggtataaccacgccgacgccgagtttcaggagcgtctgcaagaagatacgtcttttgggggcaacctcgggcgagcagtcttccaggccaagaagcgggttctcgaacctctcggtctggttgaggaaggcgctaagacggctcctggaaagaaacgtccggtagagcagtcaccacaagagccagactcctcctcgggcatcggcaagacaggccagcagcccgctaaaaagagactcaattttggtcagactggcgactcagagtcagtccccgacccacaacctctcggagaacctccagcaacccccgctgctgtgggacctactacaatggcttcaggcggtggcgcaccaatggcagacaataacgaaggtgccgacggagtgggtaatgcctcaggaaattggcattgcgattccacatggctgggcgactgagtcatcaccaccagcacccgcacctgggccttgcccacctacaataaccacctctacaagcaaatctccagtgcttcaacgggggccagcaacgacaaccactacttcggctacagcaccccctgggggtattttgatttcaacagattccactgccacttttcaccacgtgactggcagcgactcatcaacaacaattggggattccggcccaagagactcaacttcaaactcttcaacatccaagtcaaggaggtcacgcagaatgaaggcaccaagaccatcgccaataacctcaccagcaccatccaggtgtttacggactcggagtaccagctgccgtacgttctcggctctgcccaccagggctgcctgcctccgttcccggcggacgtgttcatgattccccagtacggctacctaacgctcaacaatggcagccaggcagtgggacggtcatccttttactgcctggaatactttccttcgcagatgctgagaaccggcaacaacttccagtttacttacaccttcgaggacgtgcctttccacagcagctacgcccacagccagagcttggaccggctgatgaatcctctgattgaccagtacctgtactacttgtctcggactcaaacaacaggaggcacggcaaatacgcagactctgggcttcagccaaggtgggcctaatacaatggccaatcaggcaaagaactggctgccaggaccctgttaccgccaacaacgcgtctcaacgacaaccgggcaaaacaacaatagcaactttgcctggactgctgggaccaaataccatctgaatggaagaaattcattggctaatcctggcatcgctatggcaacacacaaagacgacaaggagcgtttttttcccagtaacgggatcctgatttttggcaaacaaaatgctgccagagacaatgcggattacagcgatgtcatactcaccagcgaggaagaaatcaaaaccactaaccctgtggctacagaggaatacggtatcgtggcagataacttgcagcagcaaaacacggctcctcaaattggaactgtcaacagccagggggccttacccggtatggtctggcagaaccgggacgtgtacctgcagggtcccatctgggccaagattcctcacacggacggcaacttccacccgtctccgctgatgggcggctttggcctgaaacatcctccgcctcagatcctgatcaagaacacgcctgtacctgcggatcctccgaccaccttcaaccagtcaaagctgaactctttcatcacgcaatacagcaccggacaggtcagcgtggaaattgaatgggagctgcagaaggaaaacagcaagcgctggaaccccgagatccagtacacctccaactactacaaatctacaagtgtggactttgctgttaatacagaaggcgtgtactctgaaccccaccccattggcacccgttacctcacccgtcccctgtaa

SEQ ID NO: 1013 - DNA, 2211 bp, Artificial Sequence
  source: /note="Description of Artificial Sequence: Synthetic polynucleotide"
atggctgccgatggttatcttccagattggctcgaggacactctctctgaaggaataagacagtggtggaagctcaaacctggcccaccaccaccaaagcccgcagagcggcataaggacgacagcaggggtcttgtgcttcctgggtacaagtacctcggacccttcaacggactcgacaagggagagccggtcaacgaggcagacgccgcggccctcgagcacgacaaagcctacgaccggcagctcgacagcggagacaacccgtacctcaagtacaaccacgccgacgcggagtttcaggagcgccttaaagaagatacgtcttttgggggcaacctcgggcgagcagtcttccaggccaagaagagggttctcgaaccttttggtctggttgaggaaggtgctaagacggctcctggaaagaaacgtccggtagagcagtcgccacaagagccagactcctcctcgggcattggcaagacaggccagcagcccgctaaaaagagactcaattttggtcagactggcgactcagagtcagtccccgacccacaacctctcggagaacctccagcaacccccgctgctgtgggacctactacaatggcttcaggcggtggcgcaccaatggcagacaataacgaaggcgccgacggagtgggtaatgcctcaggaaattggcattgcgattccacatggctgggcgacagagtcatcaccaccagcacccgaacatgggccttgcccacctataacaaccacctctacaagcaaatctccagtacttcaacgggggccagtaacgacaaccactacttcggctacagcaccccctgggggtattttgacttcaacagattccactgccacttctcaccacgtgactggcagcgactcatcaacaacaactggggattccggcctaagcgactcaacttcaagctcttcaacattcaggtcaaagaggttacggacaacaatggagtcaagaccatcgccaataaccttaccagcacggtccaggtcttcacggactcggagtaccagttgccgtacgtcctcggctctgcgcaccagggctgcctgcctccgttcccggcggacgtgttcatgattccgcagtacggctacctaacgctcaacaatggcagccaggcagtgggacggtcatccttttactgcctggaatatttcccatcgcagatgctgagaacgggcaacaactttaccttcagctacacttttgaggacgttcctttccacagcagctacgctcacagccagagtctggaccgtctcatgaatcctctgattgaccagtacctgtactacttgtctcggactcaaacaacaggaggcacggcaaatacgcagactctgggcttcagccaaggtgggcctaatacaatggccaatcaggcaaagaactggctgccaggaccctgttaccgccaacaacgcgtctcaacgacaaccggacaaaacaacaatagcaactttgcctggactgctgggaccaaataccatctgaatggaagaaattcattggctaatcctggcatcgctatggcaacacacaaagacgacaaggagcgtttttttcccagtaacgggatcctgatttttggcaaacaaaatgctgccagagacaatgcggattacagcgatgtcatgctcaccagcgaggaagaaatcaaaaccactaaccctgtggctacagaggaatacggtatcgtggcagataacttgcagcagcaaaacacggctcctcaaattggaactgtcaacagccagggggccttacccggtatggtctggcagaaccgggacgtgtacctgcagggtcccatctgggccaagattcctcacacggacggcaacttccacccgtctccgctgatgggcggctttggcctgaaacatcctccgcctcagatcctgatcaagaacacgcctgtacctgcggatcctccgaccaccttcaaccagtcaaagctgaactctttcatcacgcaatacagcaccggacaggtcagcgtggaaattgaatgggagctgcagaaggaaaacagcaagcgctggaaccccgagatccagtacacctccaactactacaaatctacaagtgtggactttgctgttaatacagaaggcgtgtactctgaaccccaccccattggcacccgttacctcacccgtcccctgtaa

SEQ ID NO: 1014 - DNA, 2208 bp, Artificial Sequence
  source: /note="Description of Artificial Sequence: Synthetic polynucleotide"
atggctgccgatggttatcttccagattggctcgaggacaacctctctgagggcattcgcgagtggtgggacttgaaacctggagccccgaagcccaaagccaaccagcaaaagcaggacgacggccggggtctggtgcttcctggctacaagtacctcggacccttcaacggactcgacaagggggagcccgtcaacgcggcggatgcagcggccctcgagcacgacaaggcctacgaccggcagctcgacagcggagacaacccgtacctgcggtataaccacgccgacgcggagtttcaggagcgccttaaagaagatacgtcttttgggggcaacctcgggcgagcagtcttccaggccaagaagagggttctcgaaccttttggtctggttgaggaaggtgctaagacggctcctggaaagaaacgtccggtagagcagtcgccacaagagccagactcctcctcgggcattggcaagacaggccagcagcccgctaaaaagagactcaattttggtcagactggcgactcagagtcagtccccgacccacaacctctcggagaacctccagcaacccccgctgctgtgggacctactacaatggcttcaggcggtggcgcaccaatggcagacaataacgaaggcgccgacggagtgggtaatgcctcaggaaattggcattgcgattccacatggctgggcgacagagtcatcaccaccagcacccgcacctgggccttgcccacctacaataaccacctctacaagcaaatctccagtgcttcaacgggggccagcaacgacaaccactacttcggctacagcaccccctgggggtattttgactttaacagattccactgccacttttcaccacgtgactggcaaagactcatcaacaacaactggggattccggcccaagagactcaacttcaagctcttcaacatccaggtcaaggaggtcacgcagaatgaaggcaccaagaccatcgccaataaccttaccagcacgattcaggtctttacggactcggaataccagctcccgtacgtcctcggctctgcgcaccagggctgcctccctccgttcccggcggacgtgttcatgattccgcagtacggctacctaacactcaacaacggtagtcaggccgtgggacgctcctccttctactgcctggaatactttccttcgcagatgctgagaaccggcaacaacttccagtttacttacaccttcgaggacgtgcctttccacagcagctacgcccacagccagagcttggaccggctgatgaatcctctgattgaccagtacctgtactacttgtctcggactcaaacaacaggaggcacggcaaatacgcagactctgggcttcagccaaggtgggcctaatacaatggccaatcaggcaaagaactggctgccaggaccctgttaccgccaacaacgcgtctcaacgacaaccgggcaaaacaacaatagcaactttgcctggactgctgggaccaaataccatctgaatggaagaaattcactggctaatcctggcatcgctatggcaacacacaaagacgacaggagcgtttttttccagtaccgggatcctgattttggcaaacaaaatgctgccagagacaatgcggattacagcgatgtcatgctcaccagcgaggaagaaatcaaaaccactaaccctgtggctacagaggaatacggtatcgtggcagataacttgcagcagcaaaacacggctcctcaaattggaactgtcaacagccagggggccttacccggtatggtctggcagaaccgggacgtgtacctgcagggtcccatctgggccaagattcctcacacggacggcaacttccacccgtctccgctgatgggcggctttggcctgaaacatcctccgcctcagatcctgatcaagaacacgcctgtacctgcggatcctccgaccaccttcaaccagtcaaagctgaactctttcatcacgcaatacagcaccggacaggtcagcgtggaaattgaatgggagctgcagaaggaaaacagcaagcgctggaaccccgagatccagtacacctccaactactacaaatctacaagtgtggactttgctgttaatacagaaggcgtgtactctgaaccccaccccattggcacccgttacctcacccgtcccctgtaa

SEQ ID NO: 1015 - DNA, 2211 bp, Artificial Sequence
  source: /note="Description of Artificial Sequence: Synthetic polynucleotide"
atggctgccgatggttatcttccagattggctcgaggacaacctctctgagggcattcgcgagtggtgggcgctgaaacctggagccccgaagcccaaagccaaccagcaaaagcaggacgacggccggggtctggtgcttcctggctacaagtacctcggacccttcaacggactcgacaagggggagcccgtcaacgcggcggatgcagcagccctcgaacacgacaaagcttacgaccagcagctcaaggccggtgacaacccctacctcaagtataaccacgccgacgccgagtttcaggagcgtcttcaaggagatacgtcttttgggggcaacctcggacgagcagtcttccaggccaagaagcgggttctcgaacctcttggtctggttgaggaagcggctaagacggctcctggaaagaagaggcctgtagagcagtctcctcaggaaccggactcctccgcgggtattggcaaatcgggtgcacagcccgctaaaaagagactcaatttcggtcagactggcgacacagagtcagtcccagaccctcaacctctcggagaacctccagcagcgccctctggtgtgggacctaatacaatggctgcaggcggtggcgcaccaatggcagacaataacgaaggtgccgatggagtgggtagttcctcgggaaattggcattgcgattcccaatggctgggggacagagtcatcaccaccagcacccgaacctgggccctgcccacctacaacaaccacctctacaagcaaatctccagtgcttcaacgggggccagcaacgacaaccactacttcggctacagcaccccttgggggtattttgacttcaacagattccactgccacttttcaccacgtgactggcagcgactcatcaacaacaactggggattccggcctaagcgactcaacttcaagctcttcaacattcaggtcaaagaggttacggacaacaatggagtcaagaccatcgccaataaccttaccagcacggtccaggtcttcacggactcagactatcagctcccgtacgtgctcgggtcggctcacgagggctgcctccctccgttcccggcggacgtgttcatgattccgcagtacggctacctaacgctcaacaatggcagccaggcagtgggacggtcatccttttactgcctggaatactttccttcgcagatgctgagaaccggcaacaacttccagtttacttacaccttcgaggacgtgcctttccacagcagctacgctcacagccagagtctggaccgtctcatgaatcctctgattgaccagtacctgtactacttgtctcggactcaaacaacaggaggcacggcaaatacgcagactctgggcttcagccaaggtgggcctaatacaatggccaatcaggcaaagaactggctgccaggaccctgttaccgccaacaacgcgtctcaacgacaaccgggcaaaacaacaatagcaactttgcctggactgctgggaccaaataccatctgaatggaagaaattcattggctaatcctggcatcgctatggcaacacacaaagacgacaaggagcgtttttttcccagtaacgggatcctgatttttggcaaacaaaatgctgccagagacaatgcggattacagcgatgtcatgctcaccagcgaggaagaaatcaaaaccactaaccctgtggctacagaggaatacggtatcgtagcagataacttgcagcagcaaaacacggctcctcaaattggaactgtcaacagccagggggccttacccggtatggtctggcagaaccgggacgtgtacctgcagggtcccatctgggccaagattcctcacacggacggcaacttccacccgtctccgctgatgggcggctttggcctgaaacatcctccgcctcagatcctgatcaagaacacgcctgtacctgcggatcctccgaccaccttcaaccagtcaaagctgaactctttcatcacgcaatacagcaccggacaggtcagcgtggaaattgaatgggagctgcagaaggaaaacagcaagcgctggaaccccgagatccagtacacctccaactactacaaatctacaagtgtggactttgctgttaatacagaaggcgtgtactctgaaccccaccccattggcacccgttacctcacccgtcccctgtaa

SEQ ID NO: 1016 - DNA, 2211 bp, Artificial Sequence
  source: /note="Description of Artificial Sequence: Synthetic polynucleotide"
atggctgccgatggttatcttccagattggctcgaggacactctctctgaaggaataagacagtggtggaagctcaaacctggcccaccaccaccaaagcccgcagagcggcataaggacgacagcaggggtcttgtgcttcctgggtacaagtacctcggacccttcaacggactcgacaagggagagccggtcaacgaggcagacgccgcggccctcgagcacgacaaagcctacgaccggcagctcgacagcggagacaacccgtacctcaagtacaaccacgccgacgcggagtttcaggagcgccttaaagaagatacgtcttttgggggcaacctcgggcgagcagtcttccaggccaagaagagggttctcgaaccttttggtctggttgaggaagcggctaagacggctcctggaaagaaacgtccggtagagcagtcgccacaagagccagactcctcctcgggcattggcaagacaggccagcagcccgctaaaaagagactcaattttggtcagactggcgactcagagtcagtccccgacccacaacctctcggagaacctccagcaacccccgctgctgtgggacctactacaatggcttcaggcggtggcgcaccaatggcagacaataacgaaggcgccgacggagtgggtaatgcctcaggaaattggcattgcgattccacatggctgggcgacagagtcatcaccaccagcacccgaacatgggccttgcccacctataacaaccacctctacaagcaaatctccagtgcttcaacgggggccagcaacgacaaccactacttcggctacagcaccccctgggggtattttgacttcaacagattccactgccacttctcaccacgtgactggcagcgactcatcaacaacaactggggattccggcctaagcgactcaacttcaagctcttcaacattcaggtcaaagaggttacggacaacaatggagtcaagaccatcgccaataaccttaccagcacggtccaggtcttcacggactcagactatcagctcccgtacgtgctcgggtcggctcacgagggctgcctcccgccgttcccagcggacgttttcatgattcctcagtacggctacctaacactcaacaacggtagtcaggccgtgggacgctcctccttctactgcctggaatactttccttcgcagatgctgagaacgggcaacaactttaccttcagctacacctttgaggacgttcctttccacagcagctacgctcacagccagagtctggaccgtctcatgaatcctctgattgaccagtacctgtactacttgtctcggactcaaacaacaggaggcacggcaaatacgcagactctgggcttcagccaaggtgggcctaatacaatggccaatcaggcaaagaactggctgccaggaccctgttaccgccaacaacgcgtctcaacgacaaccgggcaaaacaacaatagcaactttgcctggactgctgggacaaaataccatctgaatggaagaaattcattggctaatcctggcatcgctatggcaacacacaaagacgacaaggagcgtttttttcccagtaacgggattctgatttttggcaaacaaaatgctgccagagacaatgcggattacagcgatgtcatgctcaccagcgaggaagaaatcaaaaccactaaccctgtggctacagaggaatacggtatcgtggcagataacttgcagcagcaaaacacggctcctcaaattggaactgtcaacagccagggggccttacccggtatggtctggcagaaccgggacgtgtacctgcagggtcccatctgggccaagattcctcacacggacggcaacttccacccgtctccgctgatgggcggctttggacttaagcacccgcctcctcagatcctcatcaaaaacacgcctgttcctgcggatcctccgaccaccttcaaccagtcaaagctgaactctttcatcacgcaatacagcaccggacaggtcagcgtggaaattgaatgggagctgcagaaggaaaacagcaagcgctggaaccccgagatccagtacacctccaactactacaaatctacaagtgtggactttgctgttaatacagaaggcgtgtactctgaaccccaccccattggcacccgttacctcacccgtcccctgtaa

SEQ ID NO: 1017 - DNA, 2211 bp, Artificial Sequence
  source: /note="Description of Artificial Sequence: Synthetic polynucleotide"
atggctgccgatggttatcttccagattggctcgaggacaacctctctgagggcattcgcgagtggtgggcgctgaaacctggagccccgaagcccaaagccaaccagcaaaagcaggacgacggccggggtctggtgcttcctggctacaagtacctcggacccttcaacggactcgacaaaggagagccggtcaacgcggcggacgcagcggccctcgagcacgacaaggcctacgaccagcagctcaaagcgggtgacaatccgtacctgcggtataaccacgccgacgccgagtttcaggagcgtctgcaagaagatacgtcttttgggggcaacctcgggcgagcagtcttccaggccaagaagcgggttctcgaacctctcggtctggttgaggaaggcgctaagacggctcctggaaagaaacgtccggtagagcagtcgccacaagagccagactcctcctcgggcatcggcaagacaggccagcagcccgctaaaaagagactcaattttggtcagactggcgactcagagtcagtccccgacccacaacctctcggagaacctccagcaacccccgctgctgtgggacctactacaatggcttcaggcggtggcgcaccaatggcagacaataacgaaggcgccgacggagtgggtagttcctcgggaaattggcattgcgattccacatggctgggcgacagagtcatcaccaccagcacccgcacctgggccttgcccacctacaataaccacctctacaagcaaatctccagtgcttcaacgggggccagcaacgacaaccactacttcggctacagcaccccctgggggtattttgacttcaacagattccactgccacttctcaccacgtgactggcagcgactcatcaacaacaactggggattccggcctaagcgactcaacttcaagctcttcaacattcaggtcaaagaggttacggacaacaatggagtcaagaccatcgccaataaccttaccagcacggtccaggtcttcacggactcggagtaccagttgccgtacgtcctcggctctgcgcaccagggctgcctccctccgttcccggcggacgtgttcatgattccgcagtacggctacctaacgctcaacaatggcagccaggcagtgggacggtcatccttttactgcctggaatatttcccatcgcagatgctgagaacgggcaacaactttaccttcagctacacctttgaggacgttcctttccacagcagctacgctcacagccagagtctggaccgtctcatgaatcctctgattgaccagtacctgtactacttgtctcggactcaaacaacaggaggcacggcaaatacgcagactctgggcttcagccaaggtgggcctaatacaatggccaatcaggcaaagaactggctgccaggaccctgttaccgccaacaacgcgtctcaacgacaaccgggcaaaacaacaatagcaactttgcctggactgctgggaccaaataccatctgaatggaagaaattcattggctaatcctggcatcgctatggcaacacacaaagacgacaaggagcgtttttttcccagtaacgggatcctgatttttggcaaacaaaatgctgccagagacaatgcggattacagcgatgtcatgctcaccagcgaggaagaaatcaaaaccactaaccctgtggctacagaggaatacggtatcgtggcagataacttgcagcagcaaaacacggctcctcaaattggaactgtcaacagccagggggccttacccggtatggtctggcagaaccgggatgtgtacctgcagggtcccatctgggccaagattcctcacacggacggcaacttccacccgtctccgctgatgggcggctttggcctgaaacatcctccgcctcagatcctgatcaagaacacgcctgtacctgcggatcctccgaccaccttcaaccagtcaaagctgaactctttcatcacgcaatacagcaccggacaggtcagcgtggaaattgaatgggagctgcagaaggaaaacagcaagcgctggaaccccgagatccagtacacctccaactactacaaatctacaagtgtggactttgctgttaatacagaaggcgtgtactctgaaccccaccccattggcacccgttacctcacccgtcccctgtaa

SEQ ID NO: 1018 - DNA, 2214 bp, Artificial Sequence
  source: /note="Description of Artificial Sequence: Synthetic polynucleotide"
atggctgccgatggttatcttccagattggctcgaggacaaccttagtgaaggaattcgcgagtggtgggcgctgaaacctggagccccgaagcccaaagccaaccagcaaaagcaggacgacggccggggtctggtgcttcctggctacaagtacctcggacccttcaacggactcgacaagggggagcccgtcaacgcggcggacgcagcggccctcgagcacgacaaggcctacgaccagcagctcaaagcgggtgacaatccgtacctgcggtataaccacgccgacgccgagtttcaggagcgtctgcaagaagatacgtcttttgggggcaacctcgggcgagcagtcttccaggccaagaagcgggttctcgaacctctcggtctggttgaggaaggcgctaagacggctcctggaaagaaacgtccggtagagcagtcgccacaagagccagactcctcctcgggcatcggcaagacaggccagcagcccgctaaaaagagactcaatttcggtcagactggcgacacagagtcagtcccagaccctcaaccaatcggagaacctcccgcagccccctcaggtgtgggatctcttacaatggcttcaggtggtggcgcaccagtggcagacaataacgaaggtgccgatggagtgggtagttcctcgggaaattggcattgcgattcccaatggctgggggacagagtcatcaccaccagcaccagaacctgggccttgcccacctacaataaccacctctacaagcaaatctccaacagcacatctggaggatcttcaaatgacaacgcctacttcggctacagcaccccctgggggtattttgactttaacagattccactgccacttttcaccacgtgactggcagcgactcatcaacaacaactggggattccgacccaagagactcaacttcaagctcttcaacatccaggtcaaggaggtcacgcagaacgaaggcaccaagaccatcgccaataacctcaccagcaccatccaggtgtttacggactcggagtaccagctgccgtacgttctcggctccgcccaccagggctgcctgcctccgttcccggcggacgtgttcatgattccccagtacggctacctaacgctcaacaacggtagtcaggccgtgggacgctcctccttctactgcctggaatactttccttcgcagatgctgagaaccggcaacaacttccagtttacttacaccttcgaggacgtgcctttccacagcagctacgcgcacagccagagcttggaccggctgatgaatcctctgattgaccagtacctgtactacttgtctcggactcaaacaacaggaggcacggcaaatacgcagactctgggcttcagccaaggtgggcctaatacaatggccaatcaggcaaagaactggctgccaggaccctgttaccgccaacaacgcgtctcaacgacaaccgggcaaaacaacaatagcaactttgcctggactgctgggaccaaataccatctgaatggaagaaattcattggctaatcctggcatcgctatggcaacacacaaagacgacaaggagcgtttttttcccagtaacgggatcctgatttttggcaaacaaaatgctgccagagacaatgcggattacagcgatgtcatgctcaccagcgaggaagaaatcaaaaccactaaccctgtggctacagaggaatacggtatcgtggcagataacttgcagcagcaaaacacggctcctcaaattggaactgtcaacagccagggggccttacccggtatggtctggcagaaccgggacgtgtacctgcagggtcccatctgggccaagattcctcacacggacggcaacttccacccgtctccgctgatgggcggctttggcctgaaacatcctccgcctcagatcctgatcaagaacacgcctgtacctgcggatcctccgaccaccttcaaccagtcaaagctgaactctttcatcacgcaatacagcaccggacaggtcagcgtggaaattgaatgggagctgcagaaggaaaacagcaagcgctggaaccccgagatccagtacacctccaactactacaaatctacaagtgtggactttgctgttaatacagaaggcgtgtactctgaaccccaccccattggcactcgttacctcacccgtcccctgtaa

SEQ ID NO: 1019 - DNA, 2211 bp, Artificial Sequence
  source: /note="Description of Artificial Sequence: Synthetic polynucleotide"
atggctgccgatggttatcttccagattggctcgaggacaacctctctgagggcattcgcgagtggtgggcgctgaaacctggagccccgaagcccaaagccaaccagcaaaagcaggacgacggccggggtctggtgcttcctggctacaagtacctcggacccttcaacggactcgacaagggggagcccgtcaacgcggcggatgcagcagccctcgaacacgacaaagcttacgaccagcagctcaaggccggtgacaacccctacctcaagtataaccacgccgacgccgagtttcaggagcgtcttcaaggagatacgtcttttgggggcaacctcggacgagcagtcttccaggccaagaagcgggttctcgaacctcttggtctggttgaggaagcggctaagacggctcctggaaagaagaggcctgtagagcagtctcctcaggaaccggactcctccgcgggtattggcaaatcgggtgcacagcccgctaaaaagagactcaatttcggtcagactggcgacacagagtcagtcccagaccctcaacctctcggagaacctccagcagcgccctctggtgtgggacctaatacaatggctgcaggcggtggcgcaccaatggcagacaataacgaaggtgccgatggagtgggtagttcctcgggaaattggcattgcgattcccaatggctgggggacagagtcatcaccaccagcacccgaacctgggccctgcccacctacaacaaccacctctacaagcaaatctccagtgcttcaacgggggccagcaacgacaaccactacttcggctacagcaccccttgggggtattttgacttcaacagattccactgccacttctcaccacgtgactggcagcgactcatcaacaacaactggggattccggcctaagcgactcaacttcaagctcttcaacattcaggtcaaagaggttacggacaacaatggagtcaagaccatcgccaataaccttaccagcacggtccaggtcttcacggactcggagtaccagttgccgtacgtcctcggctctgcgcaccagggctgcctccctccgttcccggcggacgtgttcatgattccgcagtacggctacctaacgctcaacaatggcagccaggcagtgggacggtcatccttttactgcctggaatatttcccatcgcagatgctgagaacgggcaacaactttaccttcagctacacctttgaggacgttcctttccacagcagctacgctcacagccagagtctggaccgtctcatgaatcctctgattgaccagtacctgtactacttgtctcggactcaaacaacaggaggcacggcaaatacgcagactctgggcttcagccaaggtgggcctaatacaatggccaatcaggcaaagaactggctgccaggaccctgttaccgccaacaacgcgtctcaacgacaaccgggcaaaacaacaatagcaactttgcctggactgctgggaccaaataccatctgaatggaagaaattcattggctaatcctggcatcgctatggcaacacacaaagacgacaaggagcgtttttttcccagtaacgggatcctgatttttgacaaacaaaatgctgccagagacaatgcggattacagcgatgtcatgctcaccagcgaggaagaaatcaaaaccactaaccctgtggctacagaggaatacggtatcgtggcagataacttgcagcagcaaaacacggctcctcaaattggaactgtcaacagccagggggccttacccggtatggtctggcagaaccgggatgtgtacctgcagggtcccatctgggccaagattcctcacacggacggcaacttccacccgtctccgctgatgggcggctttggcctgaaacatcctccgcctcagatcctgatcaagaacacgcctgtacctgcggatcctccgaccaccttcaaccagtcaaagctgaactctttcatcacgcaatacagcaccggacaggtcagcgtggaaattgaatgggagctgcagaaggaaaacagcaagcgctggaaccccgagatccagtacacctccaactactacaaatctacaagtgtggactttgctgttaatacagaaggcgtgtactctgaaccccaccccattggcacccgttacctcacccgtcccctgtaa

SEQ ID NO: 1020 - DNA, 2211 bp, Artificial Sequence
  source: /note="Description of Artificial Sequence: Synthetic polynucleotide"
atggctgccgatggttatcttccagattggctcgaggacactctctctgaaggaataagacagtggtggaagctcaaacctggcccaccaccaccaaagcccgcagagcggcataaggacgacagcaggggtcttgtgcttcctgggtacaagtacctcggacccttcaacggactcgacaagggagagccggtcaacgaggcagacgccgcggccctcgagcacgacaaagcctacgaccggcagctcgacagcggagacaacccgtacctcaagtacaaccacgccgacgcggagtttcaggagcgccttaaagaagatacgtcttttgggggcaacctcggacgagcagtcttccaggcgaaaaagagggttcttgaacctctgggcctggttgaggaacctgttaagacggctccgggaaaaaagaggccggtagagcactctcctgtggagccagactcctcctcgggaaccggaaaggcgggccagcagcctgcaagaaaaagattgaattttggtcagactggcgactcagagtcagtccccgacccacaacctctcggagaacctccagcaacccccgctgctgtgggacctaatacgatggctacaggcagtggcgcaccaatggcagacaataacgagggcgccgacggagtgggtaattcctcgggaaattggcattgcgattccacatggatgggcgacagagtcatcaccaccagcaccagaacctgggccctgcccacttacaacaaccatctctacaagcaaatctccagtgcttcaacgggggccagcaacgacaaccactacttcggctacagcaccccctgggggtattttgacttcaacagattccactgccacttctcaccacgtgactggcagcgactcatcaacaacaactggggattccggcctaagcgactcaacttcaagctcttcaacattcaggtcaaagaggttacggacaacaatggagtcaagaccatcgccaataaccttaccagcaccatccaggtctttacggactcggaataccagctgccgtacgttctcggctctgcccaccagggctgcctgcctccgttcccggcggacgtgttcatgattccccagtacggctacctaacactcaacaacggtagtcaggccgtgggacgctcctccttctactgcctggaatatttcccatcgcagatgctgagaacgggcaacaactttaccttcagctacacctttgaggacgttcctttccacagcagctacgctcacagccagagtctggaccgtctcatgaatcctctgattgaccagtacctgtactacttgtctcggactcaaacaacaggaggcaaggcaaatacgcagactctgggcttcagccaaggtgggcctaatacaatggccaatcaggcaaagaactggctgccaggaccctgttaccgccaacaacgcgtctcaacgacaaccgggcaaaacaacaatagcaactttgcctggactgctgggaccaaataccatctgaatggaagaaattcattggctaatcctggcatcgctatggcaacacacaaagacgacaaggagcgtttttttcccagtaacgggatcctgatttttggcaaacaaaatgctgccagagacaatgcggattacagcgatgtcatgctcaccagcgaggaagaaatcaaaaccactaaccctgtggctacagaggaatacggtatcgtggcagataacttgcagcagcaaaacacggctcctcaaattggaactgtcaacagccagggggccttacccggtatggtctggcagaaccgggacgtgtacctgcagggtcccatctgggccaagattcctcacacggacggcaacttccacccgtctccgctgatgggcggctttggcctgaaacatcctccgcctcagatcctgatcaagaacacgcctgtacctgcggatcctccgaccaccttcaaccagtcaaagctgaactctttcatcacgcaatacagcaccggacaggtcagcgtggaaattgaatgggagctgcagaaggaaaacagcaagcgctggaaccccgagatccagtacacctccaactactacaaatctacaagtgtggactttgctgttaatacagaaggcgtgtactctgaaccccaccccattggcacccgttacctcacccgtcccctgtaa

SEQ ID NO: 1021 - DNA, 2211 bp, Artificial Sequence
  source: /note="Description of Artificial Sequence: Synthetic polynucleotide"
atggctgccgatggttatcttccagattggctcgaggacaacctctctgagggcattcgcgagtggtgggcgctgaaacctggagccccgaagcccaaagccaaccagcaaaagcaggacgacggccggggtctggtgcttcctggctacaagtacctcggacccttcaacggactcgacaagggggagcccgtcaacgcggcggacgcagcggccctcgagcacgacaaggcctacgaccagcagctcaaagcgggtgacaatccgtacctgcggtataaccacgccgacgccgagtttcaggagcgtctgcaagaagatacgtcttttgggggcaacctcgggcgagcagtcttccaggccaagaagcgggttctcgaaccttttggtctggttgaggaaggtgctaagacggctcctggaaagaaacgtccggtagagcagtcgccacaagagccagactcctcctcgggcatcggcaagacaggccagcagcccgctaaaaagagactcaattttggtcagactggcgactcagagtcagtccccgacccacaacctctcggagaacctccagcaacccccgctgctgtgggacctactacaatggcttcaggcggtggcgcaccaatggcggacaataacgaaggcgccgacggagtgggtaatgcctcaggaaattggcattgcgattccacatggctgggcgacagagtcatcaccaccagcacccgcacctgggccttgcccacctacaataaccacctctacaagcaaatctccagtgcttcaacgggggccagcaacgacaaccactacttcggctacagcaccccctgggggtattttgacttcaacagattccactgccacttttcaccacgtgactggcaaagactcatcaacaacaactggggattccggcctaagcgactcaacttcaagctcttcaacattcaggtcaaagaggttacggacaacaatggagtcaagaccatcgccaataaccttaccagcacggtccaggtcttcacggactcggagtaccagttgccgtacgtcctcggctctgcgcaccagggctgcctccctccgttcccggcggacgtgttcatgattccgcagtacggctacctaacgctcaacaatggcagccaggcagtgggacggtcatccttttactgcctggaatatttcccatcgcagatgctgagaacgggcaacaactttaccttcagctacacctttgaggacgttcctttccacagcagctacgctcacagccagagtctggaccgtctcatgaatcctctgattgaccagtacctgtactacttgtctcggactcaaacaacaggaggcacgggaaatacgcagactctgggcttcagccaaggtgggcctaatacaatggccaatcaggcaaagaactggctgccaggaccctgttaccgccaacaacgcgtctcaacgacaaccgggcaaaacaacaatagcaactttgcctggactgctgggaccaaataccatctgaatggaagaaattcattggctaatcctggcatcgctatggcaacacacaaagacgacaaggagcgtttttttcccagtaacgggatcctgatttttggcaaacaaaatgctgccagagacaatgcggattacagcgatgtcatgctcaccagcgaggaagaaatcaaaaccactaaccctgtggctacagaggaatacggtatcgtggcagataacttgcagcagcaaaacacggctcctcaaattggaactgtcaacagccagggggccttacccggtatggtctggcagaaccgggacgtgtacctgcagggtcccatctgggccaagattcctcacacggacggcaacttccacccgtctccgctgatgggcggctttggcctgaaacatcctccgcctcagatcctgatcaagaacacgcctgtacctgcggatcctccgaccaccttcaaccagtcaaagctgaactctttcatcacgcaatacagcaccggacaggtcagcgtggaaattgaatgggagctgcagaaggaaaacagcaagcgctggaaccccgagatccagtacacctccaactactacaaatctacaagtgtggactttgctgttaatacagaaggcgtgtactctgaaccccaccccattggcacccgttacctcacccgtcccctgtaa

SEQ ID NO: 1022 - DNA, 2211 bp, Artificial Sequence
  source: /note="Description of Artificial Sequence: Synthetic polynucleotide"
atggctgccgatggttatcttccagattggctcgaggacaacctctctgagggcattcgcgagtggtgggacttgaaacctggagccccgaaacccaaagccaaccagcaaaagcaggacgacggccggggtctggtgcttcctggctacaagtacctcggacccttcaacggactcgacaagggggagcccgtcaacgcggcggacgcagcggccctcgagcacgacaaggcctacgaccagcagctcaaagcgggtgacaatccgtacctgcggtataaccacgccgacgccgagtttcaggagcgtctgcaagaagatacgtcttttgggggcaacctcgggcgagcagtcttccaggccaagaagcgggttctcgaacctctcggtctggttgaggaaggcgctaagacggctcctggaaagaagaggcctgtagagcagtcgccacaagagccagactcctcctcgggcatcggcaagacaggccagcagcccgctaaaaagagactcaattttggtcagactggcgactcagagtcagtccccgatccacaacctctcggagaacctccagcaacccccgctgctgtgggacctactacaatggcttcaggcggtggcgcaccaatggcagacaataacgaaggcgccgacggagtgggtagttcctcgggaaattggcattgcgattccacatggctgggcgacagagtcatcaccaccagcacccgaacatgggccttgcccacctataacaaccacctctacaagcaaatctccagtgcttcaacgggggccagcaacgacaaccactacttcggctacagcaccccctgggggtattttgacttcaacagattccactgccacttctcaccacgtgactggcagcgactcatcaacaacaactggggattccggcctaagcgactcaacttcaagctcttcaacatccaggtcaaggaggtcacgcagaatgaaggcaccaagaccatcgccaataacctcaccagcaccatccaggtgtttacggactcggagtaccagcttccgtacgtcctcggctctgcgcaccagggctgcctccctccgttcccggcggacgtgttcatgattccgcagtacggctacctaacgctcaacaatggcagccaggcagtgggacggtcatccttttactgcctggaatatttcccatcgcagatgctgagaacgggcaacaactttaccttcagctacacctttgaggacgttcctttccacagcagctacgcgcacagccagagcttggaccggctgatgaatcctctgattgaccagtacctgtactacttgtctcggactcaaacaacaggaggcacggcaaatacgcagactctgggcttcagccaaggtgggcctaatacaatggccaatcaggcaaagaactggctgccaggaccctgttaccgccaacaacgcgtctcaacgacaaccgggcaaaacaacaatagcaactttgcctggactgctgggaccaaataccatctgaatggaagaaattcattggctaatcctggcatcgctatggcaacacacaaagacgacaaggagcgtttttttcccagtaacgggatcctgatttttggcaaacaaaatgctgccagagacaatgcggattacagcgatgtcatgctcaccagcgaggaagaaatcaaaaccactaaccctgtggctacagaggaatacggtatcgtggcagataacttgcagcagcaaaacacggctcctcaaattggaactgtcaacagccagggggccttacccggtatggtctggcagaaccgggacgtgtacctgcagggtcccatctgggccaagattcctcacacggacggcaacttccacccgtctccgctgatgggcggctttggcctgaaacatcctccgcctcagatcctgatcaagaacacgcctgtacctgcggatcctccgaccaccttcaaccagtcaaagctgaactctttcatcacgcaatacagcaccggacaggtcagcgtggaaattgaatgggagctgcagaaggaaaacagcaagcgctggaaccccgagatccagtacacctccaactactacaaatctacaagtgtggactttgctgttaatacagaaggcgtgtactctgaaccccaccccattggcacccgttacctcacccgtcccctgtaa

SEQ ID NO: 1023 - DNA, 2211 bp, Artificial Sequence
  source: /note="Description of Artificial Sequence: Synthetic polynucleotide"
atggctgccgatggttatcttccagattggctcgaggacaacctctctgagggcattcgcgagtggtgggcgctgaaacctggagccccgaagcccaaagccaaccagcaaaagcaggacgacggccggggtctggtgcttcctggctacaagtacctcggacccttcaacggactcgacaagggggagcccgtcaacgcggcggatgcagcggccctcgagcacgacaaggcctacgaccagcagctcaaagcgggtgacaatccgtacctgcggtataaccacgccgacgccgagtttcaggagcgtctgcaagaagatacgtcttttgggggcaacctcgggcgagcagtcttccaggccaagaagcgggttctcgaacctctcggtctggttgaggaaggcgctaagacggctcctggaaagaaacgtccggtagagcagtcgccacaagagccagactcctcctcgggcatcggcaagacaggccagcagcccgctaaaaagagactcaattttggtcagactggcgactcagagtcagtccccgacccacaacctctcggagaacctccagcaacccccgctgctgtgggacctactacaatggctgcaggcggtggcgcaccaatggcagacaataacgaaggcgccgacggagtgggtagttcctcgggaaattggcattgcgattccacatggatgggcgacagagtcatcaccaccagcacccgaacctgggccttgcccacctataacaaccatctctacaagcaaatctccagtgcttcaacgggggccagcaacgacaaccactacttcggctacagcaccccctgggggtattttgacttcaacagattccactgccacttctcaccacgtgactggcagcgactcatcaacaacaactggggattccggcccaagagactcagcttcaagctcttcaacatccaggtcaaggaggtcacgcagaatgaaggcaccaagaccatcgccaataacctcaccagcaccatccaggtgtttacggactcggagtaccagctgccgtacgtcctcggctctgcgcaccagggctgcctccctccgttcccggcggacgtgttcatgattccgcagtacggctacctaacgctcaacaatggcagccaggcagtgggacggtcatccttttactgcctggaatatttcccatcgcagatgctgagaacgggcaacaactttaccttcagctacacctttgaggacgttcctttccacagcagctacgctcacagccagagcttggaccggctgatgaatcctctgattgaccagtacctgtactacttgtctcggactcaaacaacaggaggcacggcaaatacgcagactctgggtttcagccaaggtgggcctaatacaatggccaatcaggcaaagaactggctgcaaggaccctgttaccgccaacaacgcgtctcaacgacaaccgggcaaaacaacaatagcaactttgcctggactgctgggaccaaataccatctgaatggaagaaattcattggctaatcctggcatcgctatggcaacacacaaagacgacaaggagcgtttttttcccagtaacgggatcctgatttttggcaaacaaaatgctgccagagacaatgcggattacagcgatgtcatgctcaccagcgaggaagaaatcaaaaccactaaccctgtggctacagaggaatacggtatcgtggcagataacttgcagcagcaaaacacggctcctcaaattggaactgtcaacagccagggggccttacccggtatggtctggcagaacctggacgtgtacctgcagggtcccatctgggccaagattcctcacacggacggcaacttccacccgtctccgctgatgggcggctttggcctgaaacatcctccgcctcagatcctgatcaagaacacgcctgtacctgcggatcctccgaccaccttcaaccagtcaaagctgaactctttcatcacgcaatacagcaccggacaggtcagcgtggaaattgaatgggagctgcagaaggaaaacagcaagcgctggaaccccgagatccagtacacctccaactactacaaatctacaagtgtggactttgctgttaatacagaaggcgtgtactctgaaccccaccccattggcacccgttacctcacccgtcccctgtaa

SEQ ID NO: 1024 - DNA, 2214 bp, Artificial Sequence
  source: /note="Description of Artificial Sequence: Synthetic polynucleotide"
atggctgccgatggttatcttccagattggctcgaggacaacctctctgagggcattcgcgagtggtgggcgctgaaacctggagccccgaagcccaaagccaaccagcaaaagcaggacgacggccggggtctggtgcttcctggctacaagtacctcggacccttcaacggactcgacaagggagagcccgtcaacgcggcggacgcagcggccctcgagcacgacaaggcctacgaccagcagctcaaagcgggtgacaatccgtacctgcggtataaccacgccgacgccgagtttcaggagcgtctgcaagaagatacgtcttttgggggcaacctcgggcgagcagtcttccaggccaagaagcgggttctcgaacctctcggtctggttgaggaaggcgctaagacggctcctggaaagaagagaccggtagagccatcaccccagcgttctccagactcctcctcgggcatcggcaagacaggccagcagcccgctaaaaagagactcaattttggtcagactggcgactcagagtcagtccccgacccacaacctctcggagaacctccagcaacccccgctgctgtgggacctactacaatggcttcaggtggtggcgcaccaatggcagacaataacgaaggcgccgacggagtgggtaatgcctcaggaaattggcattgcgattcccaatggctgggcgacagagtcatcaccaccagcacccgaacatgggccttgcccacctataacaaccacctctacaagcaaatctccagtgcttcaacgggggccagcaacgacaaccactacttcggctacagcaccccctgggggtattttgacttcaacagattccactgccacttttcaccacgtgactggcagcgactcatcaacaacaactggggattccggcctaagcgactcaacttcaagctcttcaacattcaggtcaaagaggttacggacaacaatggagtcaagaccatcgccaataaccttaccagcacggtccaggtcttcacggactcagactatcagctcccgtacgtgctcgggtcggctcacgagggctgcctcccgccgttcccagcggacgttttcatgattccccagtacggctacctaacactcaacaacggtagtcaggccgtgggacgctcctccttctactgcctggaatactttccttcgcagatgctgagaaccggcaacaacttccagtttacttacaccttcgaggacgtgcctttccacagcagctacgctcacagccagagcttggaccggctgatgaatcctctgattgaccagtacctgtactacttgtctcggactcaaacaacaggaggcacggcaaatacgcagactttgggcttcagccaaggtgggcctaatacaatggccaatcaggcaaagaactgggtgccaggaccctgttaccgccaacaacgggtttcaacggcaaccgggcaaaacaacaatagcaactttgcctggactgctgggaccaaataccatctgaaaggaagaaattcattggctaatcctggcatcgctatggcaacacacaaagacgacaaggagcgtttttttcccagtaacgggatcctgatttttggcaaacaaaatgctgccagagacaatgcggattacagcgatgtcatgctcaccagcgaggaagaaatcaaaaccactaaccctgtggctacagaggaatacggtatcgtggcagataacttgcagcagcaaaacacggctcctcaaattggaactgtcaacagccagggggccttacccggtatggtctggcagaaccgggacgtgtacctgcagggtcccatctgggccaagattcctcacacggacggcaacttccacccgtctccgctgatgggcggctttggcctgaaacatcctccgcctcagatcctgatcaagaacacgcctgtacctgcggatcctccgaccaccttcaaccagtcaaagctgaactctttcatcacgcaatacagcaccggacaggtcagcgtggaaattgaatgggagctgcagaaggaaaacagcaaacgctggaacccagagattcaatacacttccaactactacaaatctacaagtgtggactttgctgttaatacagaaggcgtgtactctgaaccccaccccattggcacccgttacctcacccgtcccctgtaa

SEQ ID NO: 1025 - DNA, 2214 bp, Artificial Sequence
  source: /note="Description of Artificial Sequence: Synthetic polynucleotide"
  modified_base (676)..(676): a, c, t, or g
  modified_base (697)..(697): a, c, t, or g
  modified_base (715)..(715): a, c, t, or g
  modified_base (748)..(748): a, c, t, or g
  modified_base (750)..(750): a, c, t, or g
  modified_base (757)..(757): a, c, t, or g
  modified_base (763)..(763): a, c, t, or g
atggctgccgatggttatcttccagattggctcgaggacactctctctgaaggaataagacagtggtggaagctcaaacctggcccaccaccaccaaagcccgcagagcggcataaggacgacagcaggggtcttgtgcttcctgggtacaagtacctcggacccttcaacggactcgacaagggagagccggtcaacgaggcagacgccgcggccctcgagcacgacaaagcctacgaccggcagctcgacagcggagacaacccgtacctcaagtacaaccacgccgacgcggagtttcaggagcgccttaaagaagatacgtcttttgggggcaacctcggacgagcagtcttccaggcgaaaaagagggttcttgaacctctcggtctggttgaggaaggcgctaagacggctcctggaaagaaacgtccggtagagcagtcgccacaagagccagactcctcctcgggcatcggcaagacaggccagcagcccgctaaaaagagactcaattttggtcagactggcgactcagagtcagtccccgacccacaacctctcggagaacctccagcaacgccctctggtgtgggacctaatacaatggctgcaggcggtggcgctccaatggcagacaataacgaaggcgccgacggagtgggtagttcctcangaaattggcattgcgattccncatggctgggcgacagantcatcaccaccagcacccgaacctgggccctgncnacctacnacaacnacctctacaagcaaatctccaacagcacatctggaggagccaccaacgacaacacctacttcggctacagcaccccctgggggtattttgactttaacagattccactgccacttttcaccacgtgactggcagcgactcatcaacaacaactggggattccggcctaagcgactcaacttcaagctcttcaacatccaggtcaaggaggtcacgcagaatgaaggcaccaagaccatcgccaataacctcaccagcaccatccaggtgtttacggactcggagtaccagctgccgtacgttctcggctctgcccaccagggctgcctgcctccgttcccggcggacgtgttcatgattccccagtacggctacctaacactcaacaacggtagtcaggccgtgggacgctcctccttctactgcctggaatactttccttcgcagatgctgagaaccggcaacaacttccagtttacttacaccttcgaggacgtgcctttccacagcagctacgcccacagccagagcttggaccggctgatgaatcctctgattgaccagtacctgtactacttgtctcggactcaaacaacaggaggcacggcaaatacgcagactctgggcttcagccaaggtgggcctaatacaatggccaatcaggcaaagaactggctgccaggaccctgttaccgccaacaacgcgtctcaacgacaaccgggcaaaacaacaatagcaactttgcctggactgctgggaccaaataccatctgaatggaagaaattcattggctaatcctggcatcgctatggcaacacacaaagacgacaaggagcgtttttttcccagtaacgggatcctgatttttggcaaacaaaatgctgccagagacaatgcggattacagcgatgtcatgctcaccagcgaggaagaaatcaaaaccactaaccctgtggctacagaggaatacggtatcgtggcagataacttgcagcagcaaaacacggctcctcaaattggaactgtcaacagccagggggccttacccggtatggtttggcagaaccgggacgtgtacctgcagggtcctatctgggccaagattcctcacacggacggaaactttcatccctcgccgctgatgggaggctttggactgaaacacccgcctcctcagatcctgattaagaatacacctgttcccgcggatcctccaactaccttcagtcaagctaagctggcgtcgttcatcacgcaatacagcacaggacaagtgagtgtggaaattgaatgggagctgcagaaagaaaacagcaagcgctggaatcccgaagtgcagtacacatccaattatgcaaaatctgccaacgttgattttactgtggacaacaatggactttatactgagcctcgccccattggcacccgttaccttacccgtcccctgtaa

SEQ ID NO: 1026 - DNA, 2214 bp, Artificial Sequence
  source: /note="Description of Artificial Sequence: Synthetic polynucleotide"
atggctgccgatggttatcttccagattggctcgaggacaacctctctgagggcattcgcgagtggtgggacttgaaacctggagccccgaagcccaaagccaaccagcaaaagcaggacgacggccggggtctggtgcttcctggctacaagtacctcggacccttcaacggactcgacaagggggagcccgtcaacgcggcggacgcagcggccctcgagcacgacaaggcctacgaccagcagctcaaagcgggtgacaatccgtacctgcggtataaccacgccgacgccgagtttcaggagcgtctgcaagaagatacgtcttttgggggcaacctcgggcgagcagtcttccaggccaagaagcgggttctcgaacctctcggtctggttgaggaaggcgctaagacggctcctggaaagaagagaccggtagagccatcaccccagcgttctccagactcctctacgggcatcggcaagaaaggccagcagcccgcgaaaaagagactcaactttgggcagactggcgactcagagtcagtgcccgaccctcaaccaatcggagaaccccccgcaggcccctctggtgtgggatctcttacaatggcttcaggtggtggcgcaccagtggcagacaataacgaaggtgccgatggagtgggtagttcctcgggaaattggcattgcgattcccaatggctgggggacagagtcatcaccaccagcacccgaacatgggccttgcccacctataacaaccacctctacaagcaaatctccagtgcttcaacgggggccagcaacgacaaccactacttcggctacagcaccccctgggggtattttgactttaacagattccactgccacttctcaccacgtgactggcagcgactcatcaacaacaactggggattccggcccaagagactcaacttcaagctcttcaacatccaggtcaaggaggtcacggacaatgatggagtcaagaccatcgccaataaccttaccagcacgattcaggtctttacggactcggaataccagttgccgtacgtcctcggctctgcgcaccagggctgcctgcctccgttcccggcggacgtgttcatgattccgcagtacggctacctaacgctcaacaatggcagccaggcagtgggacggtcatccttttactgcctggaatatttcccatcgcagatgctgagaacgggcaacaactttaccttcagctacacttttgaggacgttcctttccacagcagctacgctcacagccagagtctggaccgtctcatgaatcctctgattgaccagtacctgtactacttgtctcggactcaaacaacaggaggcacggcaaatacgcagactctgggcttcagccaaggtgggcctaatacaatggccaatcacgcaaagaactggctgccaggaccctgttaccgccaacaacgcgtctcaacgacaaccggacaaaacaacaatagcaactttgcctggactgctgggaccaaataccatctgaatggaagaaattcattggctaatcctggcatcgctatggcaacacacaaagacgacaaggagcgtttttttcccagtaacgggatcctgatttttggcaaacaaaatgctgccagagacaatgcggattacagcgatgtcatgctcaccagcgaggaagaaatcaaaaccactaaccctgtggctacagaggaatacggtatcgtggcagataacttgcagcagcaaaacacggctcctcaaattggaactgtcaacagccagggggccttacccggtatggtctggcagaaccgggacgtgtacctgcagggtcccatctgggccaagattcctcacacggacggcaacttccacccgtctccgctgatgggcggctttggcctgaaacatcctccgcctcagatcctgatcaagaacacgcctgtacctgcggatcctccgaccaccttcaaccagtcaaagctgaactctttcatcacgcaatacagcaccggacaggtcagcgtggaaattgaatgggagctgcagaaggaaaacagcaagcgctggaaccccgagatccagtacacctccaactactacaaatctacaagtgtggactttgctgttaatacagaaggcgtgtactctgaaccccaccccattggcacccgttacctcacccgtcccctgtaa

SEQ ID NO: 1027 - DNA, 2211 bp, Artificial Sequence
  source: /note="Description of Artificial Sequence: Synthetic polynucleotide"
atggctgccgatggttatcttccagattggctcgaggacactctctctgaaggaataagacagtggtggaagctcaaacctggcccaccaccaccaaagcccgcagagcggcacaaggacgacagcaggggtcttgtgcttcctgggtacaagtacctcggacccttcaacggactcgacaagggagagccggtcaacgaggcagacgccgcggccctcgagcacgacaaagcctacgaccggcagctcgacagcggagacaacccgtacctcaagtacaaccacgccgacgcggagtttcaggagcgccttaaagaagatacgtcttttgggggcaacctcggacgagcagtcttccaggcgaaaaagagggttcttgaacctctgggcctggttgaggaacctgttaagacggctccgggaaaaaagaggccggtagagcactctcctgtggagccagactcctcctcgggaaccggaaaggcgggccagcagcctgctaaaaagagactcaattttggtcagactggcgactcagagtcagtccccgacccacaacctctcggagaacctccagcaacccccgctgctgtgggacctactacaatggcttcaggtggtggcgcaccaatggcagacaataacgaaggcgccgacggagtgggtaatgcctcaggaaattggcattgcgattccacatggctgggcgacagagtcatcaccaccagcacccgcacctgggccttgcccacctacaataaccacctctacaagcaaatctccagtgcttcaacgggggccagcaacgacaaccactacttcggctacagcaccccctgggggtattttgacttcaacagattccactgccacttctcaccacgtgactggcagcgactcatcaacaacaactggggattccggcccaagagactcaacttcaaactcttcaacatccaagtcaaggaggtcacgcagaatgaaggcaccaagaccatcgccaataacctcaccagcaccatccaggtgtttacggactcggagtaccagctgccgtacgttctcggctctgcccaccagggctgcctgcctccgttcccggcggacgtgttcatgattccccagtacggctacctaacactcaacaacggtagtcaggccgtgggacgctcctccttctactgcctggaatactttccttcgcagatgctgagaaccggcaacaacttccagtttacttacaccttcgaggacgtgcctttccacagcagctacgcgcacagccagagcttggaccggctgatgaatcctctgattgaccagtacctgtactacttgtctcggactcaaacaacaggaggcacggcaaatacgcagactctgggcttcagccaaggtgggcctaatacaatggccaatcaggcaaagaactggctgccaggaccctgttaccgccaacaacgcgtctcaacgacaaccgggcaaaacaacaatagcaactttgcctggactgctgggaccaaataccatctgaatggaagaaattcattggctaatcctggcatcgctatggcaacacacaaagacgacaaggagcgtttttttcccagtaacgggatcctgatttttggcaaacaaaatgctgccagagacaatgcggattacagcgatgtcatgctcaccagcgaggaagaaatcaaaaccactaaccctgtggctacagaggaatacggtatcgtggcagataacttgcagcagcaaaacacggctcctcaaattggaactgtcaacagccagggggccttacccggtatggtctggcagaaccgggacgtgtacctgcagggtcccatctgggccaagattcctcacacggacggcaacttccacccgtctccgctgatgggcggctttggcctgaaacatcctccgcctcagatcctgatcaagaacacgcctgtacctgcggatcctccgaccaccttcaaccagtcaaagctgaactctttcatcacgcaatacagcaccggacaggtcagcgtggaaattgaatgggagctgcagaaggaaaacagcaagcgctggaaccccgagatccagtacacctccaactactacaaatctacaagtgtggactttgctgttaatacagaaggcgtgtactctgaaccccaccccattggcacccgttacctcacccgtcccctgtaa

SEQ ID NO: 1028 - DNA, 2211 bp, Artificial Sequence
  source: /note="Description of Artificial Sequence: Synthetic polynucleotide"
atggctgccgatggttatcttccagattggctcgaggacaacctctctgagggcattcgcgagtggtgggcgctgaaacctggagccccgaagcccaaagccaaccagcaaaagcaggacgacggccggggtctggtgcttcctggctacaagtacctcggacccttcaacggactcgacaagggggagcccgtcaacgcggcggatgcagcggccctcgagcacgacaaggcctacgaccagcagctccaagcgggtgacaatccgtacctgcggtataaccacgccgacgccgagtttcaggagcgtcttcaaggagatacgtcttttgggggcaacctcggacgagcagtcttccaggccaagaagcgggttctcgaacctctcggtctggttgaggaaggcgctaagacggctcctggaaagaaacgtccggtagagcagtcgccacaagagccagactcctcctcgggcatcggcaagacaggccagcagcccgctaaaaagagactcaattttggtcagactggcgactcagagtcagtccccgacccacaacctctcggagaacctccagcaacccccgctgctgtgggacctactacaatggcttcaggcggtggcgcaccaatggcggacaataacgaaggcgccgatggagtgggtaatgcctcaggaaattggcattgcgattccacatggctgggcgacagagtcatcaccaccagcacccgcacctgggccttgcccacctacaataaccacctctacaagcaaatctccagtgcttcaacgggggccagcaacgacaaccactacttcggctacagcaccccctgggggtattttgacttcaacagattccactgccacttctcaccacgtgactggcagcgactcatcaacaacaactggggattccggcctaagcgactcaacttcaagctcttcaacattcaggtcaaagaggttacggacaacaatggagtcaagaccatcgccaataacctcaccagcaccatccaggtgtttacggactcggagtaccagctgccgtacgttctcggctctgcccaccagggctgcctgcctccgttcccggcggacgtgttcatgattccccagtacggctacctaacactcaacaacggtagtcaggccgtgggacgctcctccttctactgcctggaatactttccttcgcagatgctgagaaccggcaacaacttccagtttacttacaccttcgaggacgtgcctttccacagcagctacgcccacagccagagcttggaccggctgatgaatcctctgattgaccagtacctgtactacttgtctcggactcaaacaacaggaggcacggcaaatacgcagactctgggcttcagccaaggtgggcctaatacaatggccaatcaggcaaagaactggctgccaggaccctgttaccgccaacaacgcgtctcaacgacaaccgggcaaaacaacaatagcaactttgcctggactgctgggaccaaataccatctgaatggaagaaattcattggctaatcctggcatcgctatggcaacacacaaagacgacaaggagcgtttttttcccagtaacgggatcctgatttttggcaaacaaaatgctgccagagacaatgcggattacagcgatgtcatgctcaccagcgaggaagaaatcaaaaccactaaccctgtggctacagaggaatacggtatcgtggcagataacttgcagcagcaaaacacggctcctcaaattggaactgtcaacagccagggggccttacccggtatggtctggcagaaccgggacgtgtacctgcagggtcccatctgggccaagattcctcacacggacggcaacttccacccgtctccgctgatgggcggctttggcctgaaacatcctccgcctcagatcctgatcaagaacacgcctgtacctgcggatcctccgaccaccttcaaccagtcaaagctgaactctttcatcacgcaatacagcaccggacaggtcagcgtggaaattgaatgggagctgcagaaggaaaacagcaagcgctggaaccccgagatccagtacacctccaactactacaaatctacaagtgtggactttgctgttaatacagaaggcgtgtactctgaaccccaccccattggcacccgttacctcacccgtcccctgtaa

SEQ ID NO: 1029 - DNA, 2217 bp, Artificial Sequence
  source: /note="Description of Artificial Sequence: Synthetic polynucleotide"
atggctgccgatggttatcttccagattggctcgaggacactctctctgaaggaataagacagtggtggaagctcaaacctggcccaccaccaccaaagcccgcagagcggcataaggacgacagcaggggtcttgtgcttcctgggtacaagtacctcggacccttcaacggactcgacaagggggagcccgtcaacgcggcggatgcagcggccctcgagcacgacaaggcctacgaccagcagctcaaagcgggtgacaatccgtacctgcggtataaccacgccgacgcggagtttcaggagcgccttaaagaagatacgtcttttgggggcaacctcggacgagcagtcttccaggcgaaaaagagggttcttgaacctctcggtctggttgaggaaggcgctaagacggctcctggaaagaagagaccggtagagccatcaccccagcgttctccagactcctctacgggcatcggcaagaaaggccaacagcccgccagaaaaagactcaattttggtcagactggcgactcagagtcagttccagaccctcaacctctcggagaacctccagcagcgccctctggtgtgggacctaatacaatggctgcaggcggtggcgcaccaatggcagacaataacgaaggcgccgacggagtgggtagttcctcgggaaattggcattgcgattcccaatggctgggggacagagtcatcaccaccagcaccagaacctgggccctgcccacctacaacaatcacctctacaagcaaatctccaacagcacatctggaggatcttcaaatgacaacgcctacttcggctacagcaccccctgggggtattttgacttcaaccgcttccactgccacttctcaccacgtgactggcagcgactcatcaacaacaactggggattccggcccaagagactcaacttcaagctcttcaacattcaggtcaaagaggttacggacaacaatggagtcaagaccatcgccaataaccttaccagcacggtccaggtctttacggactcggagtaccagttgccgtacgtcctcggctctgcgcaccagggctgcctccctccgttcccggcggacgtgttcatgattccccagtacggctacctaacactcaacaacggtagtcaggccgtgggacgctcctccttctactgcctggaatatttcccttctcagatgctgagaacgggcaacaactttaccttcagctacacctttgaggacgttcctttccacagcagctacgctcacagccagagtctggaccgtctcatgaatcctctgattgaccagtacctgtactacttgtctcggactcaaacaacaggaggcacggcaaatacgcagactctgggcttcagccaaggtgggcctaatacaatggccaatcaggcaaagaactggctgccaggaccctgttaccgccaacaacgcgtctcaacgacaaccgggcaaaacaacaatagcaactttgcctggactgctgggaccaaataccatctgaatggaagaaattcattggctaatcctggcatcgctatggcaacacacaaagacgacaaggagcgtttttttcccagtaacgggatcctgatttttggcaaacaaaatgctgccagagacaatgcggattacagcgatgtcatgctcaccagcgaggaagaaatcaaaaccactaaccctgtggctacagaggaatacggtatcgtggcagataacttgcagcagcaaaacacggctcctcaaattggaactgtcaacagccagggggccttacccggtatggtctggcagaaccgggacgtgtacctgcagggtcccatctgggcaaagattccacacacggacggacattttcacccctctcccctcatgggtggattcggacttaaacaccctcctccacagattctcatcaagaacaccccggtacctgcgaatcctccgaccaccttcaaccagtcaaagctgaactctttcatcacgcaatacagcacaggacaagtgagtgtggaaattgaatgggagctgcagaaagaaaacagcaagcgctggaatcccgaagtgcagtacacatccaattatgcaaaatctgccaacgttgattttactgtggacaacaatggactttatactgagcctcgccccattggcacccgttaccttacccgtcccctgtaa

SEQ ID NO: 1030 - DNA, 2211 bp, Artificial Sequence
  source: /note="Description of Artificial Sequence: Synthetic polynucleotide"
atggctgccgatggttatcttccagattggctcgaggacaacctctctgagggcattcgcgagtggtgggcgctgaaacctggagccccgaaacccaaagccaaccagcaaaagcaggacgacggccggggtctggtgcttcctggctacaagtacctcggacccttcaacggactcgacaagggggagcccgtcaacgcggcggacgcagcggccctcgagcacgacaaggcctacgaccagcagctcaaggcgggtgacaatccgtacctgcggtataaccacgccgacgccgagtttcaggagcgtctgcaagaagatacgtcttttgggggcaacctcgggcgagcagtcttccaggccaaaaagaggcttcttgaacctcttggtctggttgaggaaggggctaagacggctcctggaaagaaacgtccggtagagcagtcgccacaagagccagactcctcctcgggcattggcaagacaggccagcagcccgctaaaaagagactcaactttgggcagactggcgactcagagtcagtgcccgatcctcaacctctcggagaacctccagcaacccccgctgctgtgggacctactacaatggcttcaggcggtggcgcaccaatggcggacaataacgaaggcgccgatggagtgggtaattcctcgggaaattggcattgcgattccacatggatgggcgacagagtcatcaccaccagcacccgaacctgggccctgcccacctacaacaatcacctctacaagcaaatctccagtgcttcaacgggggccagcaacgacaaccactacttcggctacagcaccccctgggggtattttgatttcaacagattccactgccatttttcaccacgtgactggcagcgactcatcaacaacaactggggattccggcccaagagactcaacttcaagctcttcaacatccaggtcaaggaggtcacgcagaatgaaggcaccaagaccatcgccaataaccttaccagcacgattcaggtctttacggattcggaataccagctcccgtacgtcctcggctctgcgcaccagggctgcctccctccgttcccggcggacgtgttcattattccgcagtacggctacctaacgctcaacaatggtagccaggcagtgggacggtcatccttttactgcctggaatatttcccatcgcagatgctgagaacgggcaacaactttaccttcagctacacctttgaggacgttcctttccacagcagctacgctcacagccagagtctggaccgtctcatgaatcctctgattgaccagtacctgtactacttgtctcggactcaaacaacaggaggcacggcaaatacgcagactctgggcttcagccaaggtgggcctaatacaatggccaatcaggcaaagaactggctgccaggaccctgttaccgccaacaacgcgtctcaacgacaaccgggcaaaacaacaatagcaactttgcctggactgctgggaccaaataccatctgaatggaagaaattcattggctaatcctggcatcgctatggcaacacacaaagacgacaaggagcgtttttttcccagtaacgggatcctgatttttggcaaacaaaatgctgccagagacaatgcggattacagcgatgtcatgctcaccagcgaggaagaaatcaaaaccactaaccctgtggctacagaggaatacggtatcgtggcagataacttgcagcagcaaaacacggctcctcaaattggaactgtcaacagccagggggccttacccggtatggtctggcagaaccgggacgtgtacctgcagggtcccatctgggccaagattcctcacacggacggcaacttccacccgtctccgctgatgggcggctttggcctgaaacatcctccgcctcagatcctgatcaagaacacgccagtacctgcggatcctccgaccaccttcaaccagtcaaagctgaactctttcatcacgcaatacagcaccggacaggtcagcgtggaaattgaatgggagctgcagaaggaaaacagcaagcgctggaaccccgagatccagtacacctccaactactacaaatctacaagtgtggactttgctgttaatacagaaggcgtgtactctgaaccccaccccattggcacccgttacctcacccgtcccctgtaa

SEQ ID NO: 1031 - DNA, 2211 bp, Artificial Sequence
  source: /note="Description of Artificial Sequence: Synthetic polynucleotide"
atggctgccgatggttatcttccagattggctcgaggacaacctctctgagggcattcgcgagtggtgggcgctgaaacctggagccccgaaacccaaagccaaccagcaaaagcaggacgacggccggggtctggtgcttcctggctacaagtacctcggacccttcaacggactcgacaagggggagcccgtcaacgcggcggatgcagcggccctcgagcacgacaaggcctacgaccagcagctcaaggcgggtgacaatccgtacctgcggtataaccacgccgacgccgagtttcaggagcgtctgcaagaagatacgtcttttgggggcaacctcgggcgagcagtcttccaggccaaaaagagggttcttgaaccttttggtctggttgaggaagctgctaagacggctcctggaaagaaacgtccggtagagcagtcgccacaagagccagactcctcctcgggcattggcaagacaggccagcagcccgctaaaaagagactcaattttggtcagactggcgactcagagtcagtgcccgaccctcaacctctcggagaacctccagcaacccccgctgctgtgggacctactacaatggcttcaggcggtggcgcaccaatggcagacaataacgaaggcgccgatggagtgggtaatgcctcaggaaattggcattgcgattccacatggctgggcgacagagtcatcaccaccagcacccgaacctgggccctgcccacctacaacaatcacctctacaagcaaatctccagtgcttcaacgggggccagcaacgacaaccactacttcggctacagcaccccctgggggtattttgactttaacagattccactgccacttttcaccacgtgactggcagcgactcatcaacaacaactggggattccggcccaagagactcaacttcaagctcttcaacatccaggtcaaggaggtcacgcagaatgaaggcaccaagaccatcgccaataacctcaccagcaccattcaggtctttacggattcggaataccagctcccgtacgtcctcggctctgcccaccagggctgcctccctccgttcccggcggacgtgttcatgattccgcagtacggctacctaacgctcaacaatggtagccaggcagtgggacggtcatccttttactgcctggaatatttcccatcgcagatgctgagaacgggcaacaactttaccttcagctacacctttgaggacgttcctttccacagcagctacgctcacagccagagtctggaccgtctcatgaatcctctgattgaccagtacctgtactacttgtctcggactcaaacaacaggaggcacggcaaatacgcagactctgggcttcagccaaggtgggcctaatacaatggccaatcacgcaaagaactggctgccaggaccctgttaccgccaacaacgcgtctcaacgacaaccgggcaaaacaacaatagcaactttgcctggactgctgggaccaaataccatctgaatggaagaaattcattggctaatcctggcatcgctatggcaacacacaaagacgacaaggagcgtttttttcccagtaacgggatcctgatttttggcaaacaaaatgctgccagagacaatgcggattacagcgatgtcatgctcaccagcgaggaagaaatcaaaaccactaaccctgtggctacagaggaatacggtatcgtggcagataacttgcagcagcaaaacacggctcctcaaattggaactgtcaacagccagggggccttacccggtatggtctggcagaaccgggacgtgtacctgcagggtcccatctgggccaagattcctcacacggacggcaacttccacccgtctccgctgatgggcggctttggcctgaaacatcctccgcctcagatcctgatcaagaacacgcctgtacctgcggatcctccgaccaccttcaaccagtcaaagctgaactctttcatcacgcaatacagcaccggacaggtcagcgtggaaattgaatgggagctgcagaaggaaaacagcaagcgctggaaccccgagatccagtacacctccaactactacaaatctacaagtgtggactttgctgttaatacagaaggcgtgtactctgaaccccaccccattggcacccgttacctcacccgtcccctgtaa

SEQ ID NO: 1032 - DNA, 2211 bp, Artificial Sequence
  source: /note="Description of Artificial Sequence: Synthetic polynucleotide"
atggctgccgatggttatcttccagattggctcgaggacaacctctctgagggcattcgcgagtggtgggcgctgaaacctggagccccgaagcccaaagccaaccagcaaaagcaggacgacggccggggtctggtgcttcctggctacaagtacctcggacccttcaacggactcgacaaaggagagcccgtcaacgaggcggacgcggcggccctcgaacacgacaaggcttacgaccagcagctcaaggccggtgacaacccctacctgcggtacaaccacgccgacgccgagttccaggagcggctgcaagaagatacgtcttttgggggcaacctcgggcgagcagtcttccaggccaagaagaggcttcttgaacctcttggtctggttgaggaagcggctaagacggctcctggaaagaagaggcctgtagagcagtctcctcaggaaccggactcctccgcgggtattggcaaatcaggtgcacagcccgctaaaaagagactcaattttggtcagactggcgactcagagtcagtccccgacccacaacctctcggagaacctccagcaacccccgctgctgtgggacctactacaatggcttcaggcggtggcgcaccaatggcagacaataacgaaggcgccgatggagtgggtaatgcctcaggaaattggcattgcgattccacatggctgggcgacagagtcatcaccaccagcacccgaacctgggccctgcccacctataacaaccatctctacaagcaaatctccagtgcttcaacgggggccagtaacgacaaccactacttcggctacagcaccccctgggggtattttgactttaacagattccactgccacttctcaccacgtgactggcagcgactcatcaacaacaactggggattccggcccaagcgactcaacttcaagctcttcaacattcaggtcaaagaggttacggacaacgatggagtcaagaccatcgccaataaccttaccagcaccattcaggtgtttacggactcggaataccagctgccgtacgttctcggctccgcccaccagggctgcctgcctccgttcccggcggacgtgttcatgattccccagtacggctacctaacactcaacaacggtagtcaggccgtgggacgctcctccttctactgcctggaatactttccttcgcagatgctgagaactggcaacaacttccagtttacttacaccttcgaggacgtgcctttccacagcagctacgcccacagccagagcttggaccggctgatgaatcctctgattgaccagtacctgtactacttgtctcggactcaaacaacaggaggcacggcaaatacgcagactctgggcttcagccaaggtgggcctaatacaatggccaatcaggcaaagaactggctgccaggaccctgttaccgccaacaacgcgtctcaacgacaaccgggcaaaacaacaatagcaactttgcctggactgctgggaccaaataccatctgaatggaagaaattcattggctaatcctggcatcgctatggcaacacacaaagacgacaaggagcgtttttttcccagtaacgggatcctgatttttggcaaacaaaatgctgccagagacaatgcggattacagcgatgtcatgctcaccagcgaggaagaaatcaaaaccactaaccctgtggctacagaggaatacggtatcgtggcagataacttgcagcagcaaaacacggctcctcaaattggaactgtcaacagccagggggccttacccggtatggtctggcagaaccgggacgtgtacctgcagggtcccatctgggccaagattcctcacacggacggcaacttccacccgtctccgctgatgggcggctttggcctgaaacatcctccgcctcagatcctgatcaagaacacgcctgtacctgcggatcctccgaccaccttcaaccagtcaaagctgaactctttcatcacgcaatacagcaccggacaggtcagcgtggaaattgaatgggagctgcagaaggaaaacagcaagcgctggaaccccgagatccagtacacctccaactactacaaatctacaagtgtggactttgctgttaatacagaaggcgtgtactctgaaccccaccccattggcacccgttacctcacccgtcccctgtaa

SEQ ID NO: 1033 - DNA, 2211 bp, Artificial Sequence
  source: /note="Description of Artificial Sequence: Synthetic polynucleotide"
atggctgccgatggttatcttccagattggctcgaggacaacctctctgagggcattcgcgagtggtgggcgctgaaacctggagccccgaagcccaaagccaaccagcaaaagcaggacgacggccggggtctggtgcttcctggctacaagtacctcggacccttcaacggactcgacaagggggagcccgtcaacgcggcggatgcagcggccctcgagcacgacaaagcctacgaccagcagctcaaagcgggtgacaatccgtacctgcggtataaccacgccgacgccgagtttcaggagcgtctgcaagaagatacgtcttttgggggcaacctcgggcgagcagtcttccaggccaagaagagggttctcgaacctttgggtctggttgaggaaggggctaagacggctcctggaaagaaaaggccggtagagcagtctcctcaggaaccggactcctccgcgggtattggcaagacaggtgcacagcccgctaaaaagagactcaattttggtcagactggcgactcagagtcagtccccgacccacaacctctcggagaacctccagcaacccccgctgctgtgggacctactacaatggcttcaggcggtggcgcaccaatggcagacaataacgaaggcgccgacggagtgggtagtgcctcgggaaattggcattgcgattccacatggctgggcgacagagtcatcaccaccagcacccgaacctgggccctgcccacctataacaaccatctctacaagcaaatctccagtgcttcaacgggggccagtaacgacaaccactacttcggctacagcaccccctgggggtattttgacttcaacagattccactgccacttctcaccacgtgactggcagcgactcatcaacaacaactggggattccggcccaagcgactcaacttcaagctcttcaacattcaggtcaaagaggttacggacaacaatggagtcaagaccatcgccaataaccttaccagcacgatccaggtctttacggactcggagtaccagctgccgtacgtcctcggctctgcgcaccagggctgcctgcctccgttcccggcggacgtgttcatgattccgcagtacggctacctaacgctcaacaatggtagccaggcagtgggacggtcatccttttactgcctggaatatttcccatcgcagatgctgagaacgggcaacaactttaccttcagctacacctttgaggacgttcctttccacagcagctacgctcacagccagagtctggaccgtctcatgaatcctctgattgaccagtacctgtactacttgtctcggactcaaacaacaggaggcacggcaaatacgcagactctgggcttcagccaaggtgggcctaatacaatggccaatcaggcaaagaactggctgccaggaccctgttaccgccaacaacgcgtctcaacgacaaccgggcaaaacaacaatagcaactttgcctggactgctgggaccaaataccatctgaatggaagaaattcattggctaatcctggcatcgctatggcaacacacaaagacgacaaggagcgtttttttcccagtaacgggatcctgatttttggcaaacaaaatgctgccagagacaatgcggattacagcgatgtcatgctcaccagcgaggaagaaatcaaaaccactaaccctgtggctacagaggaatacggtatcgtggcagataacttgcagcagcaaaacacggctcctcaaattggaactgtcaacagccagggggccttacccggtatggtctggcagaaccgggacgtgtacctgcagggtcccatctgggccaagattcctcacacggacggcaacttccacccgtctccgctgatgggcggctttggcctgaaacatcctccgcctcagatcctgatcaagaacacgcctgtacctgcggatcctccgaccaccttcaaccagtcaaagctgaactctttcatcacgcaatacagcaccggacaggtcagcgtggaaattgaatgggagctgcagaaggaaaacagcaagcgctggaaccccgagatccagtacacctccaactactacaaatctacaagtgtggactttgctgttaatacagaaggcgtgtactctgaaccccaccccattggcacccgttacctcacccgtcccctgtaa

SEQ ID NO: 1034 - DNA, 2211 bp, Artificial Sequence
  source: /note="Description of Artificial Sequence: Synthetic polynucleotide"
atggctgccgatggttatcttccagattggctcgaggacaacctctctgagggcattcgcgagtggtgggacttgaaacctggagccccgaagcccaaagccaaccagcaaaagcaggacgacggccggggtctggtgcttcctggctacaagtacctcggacccttcaacggactcgacaagggggagcccgtcaacgcggcggacgcagcggccctcgagcacgacaaggcctacgaccagcagctcaaagcgggtgacaatccgtacctgcggtataaccacgccgacgccgagtttcaggagcgtctgcaagaagatacgtcttttgggggcaacctcggacgagcagtcttccaggccaaaaagaggcttcttgaacctcttggtctggttgaggaagcggctaagacggctcctggaaagaagaggcctgtagagcagtctcctcaggaaccggactcctccgcgggtattggcaaatcgggtgcacagcccgctaaaaagagactcaatttcggtcagactggcgacacagagtcagtcccagaccctcaaccaatcggagaacctccagcagcgccctctggtgtgggacctaatacaatggctgcaggcggtggcgcaccaatggcagacaataacgaaggtgccgatggagtgggtagttcctcgggaaattggcattgcgattcccaatggctgggggacagagtcatcaccaccagcacccgaacctgggccctgcccacctataacaaccacctctacaagcaaatctccagtgcttcaacgggggccagcaacgacaaccactactttggctacagcaccccttgggggtattttgacttcaacagattccactgccacttttcaccacgtgactggcaaagactcatcaacaacaactggggattccgacccaagagactcaacttcaagctcttcaacatccaggtcaaggaggtcacgcagaatgaaggcaccaagaccatcgccaataacctcaccagcaccatccaggtgtttacggactcggagtaccagctgccgtacgttctcggctctgcccaccagggctgcctgcctccgttcccggcggacgtgttcatgattccccagtacggctacctaacactcaacaacggtagtcaggccgtgggacgctcctccttctactgcctggaatactttccttcgcagatgctgagaaccggcaacaacttccagtttacttacaccttcgaggacgtgcctttccacagcagctacgcgcacagccagagcttggaccggctgatgaatcctctgattgaccagtacctgtactacttgtctcggactcaaacaacaggaggcacggcaaatacgcagactctgggcttcagccaaggtgggcctaatacaatggccaatcacgcaaagaactggctgccaggaccctgttaccgccaacaacgcgtctcaacgacaaccgggcaaaacaacaatagcaactttgcctggactgctgggaccaaataccatctgaatggaagaaattcattggctaatcctggcatcgctatggcaacacacaaagacgacaaggagcgtttttttcccagtaacgggatcctgatttttggcaaacaaaatgctgccagagacaatgcggattacagcgatgtcatgctcaccagcgaggaagaaatcaaaaccactaaccctgtggctacagaggaatacggtatcgtggcagataacttgcagcagcaaaacacggctcctcaaattggaactgtcaacagccagggggccttacccggtatggtctggcagaaccgggacgtgtacctgcagggtcccatctgggccaagattcctcacacggacggcaacttccacccgtctccgctgatgggcggctttggcctgaaacatcctccgcctcagatcctgatcaagaacacgcctgtacctgcggatcctccgaccaccttcaaccagtcaaagctgaactctttcatcacgcaatacagcaccggacaggtcagcgtggaaattgaatgggagctgcagaaggaaaacagcaagcgctggaaccccgagatccagtacacctccaactactacaaatctacaagtgtggactttgctgttaatacagaaggcgtgtactctgaaccccaccccattggcacccgttacctcacccgtcccctgtaa

SEQ ID NO: 1035 - DNA, 2214 bp, Artificial Sequence
  source: /note="Description of Artificial Sequence: Synthetic polynucleotide"
atggctgccgatggttatcttccagattggctcgaggacaaccttagtgaaggaattcgcgagtggtgggcgctgaaacctggagccccgaagcccaaagccaaccagcaaaagcaggacgacggccggggtctggtgcttcctggctacaagtacctcggacccttcaacggactcgacaagggggagcccgtcaacgcggcggacgcagcggccctcgagcacgacaaggcctacgaccagcagctcaaagcgggtgacaatccgtacctgcggtataaccacgccgacgccgagtttcaggagcgtctgcaagaagatacgtcttttgggggcaacctcgggcgagcagtcttccaggccaagaagcgggttctcgaacctctcggtctggttgaggaaggcgctaagacggctcctggaaagaaacgtccggtagagcagtcgccacaagagccagactcctcctcgggcatcggcaagacaggccagcagcccgctaaaaagagactcaatttcggtcagactggcgacacagagtcagtcccagaccctcaaccaatcggagaacctcccgcagccccctcaggtgtgggatctcttacaatggcttcaggtggtggcgcaccagtggcagacaataacgaaggtgccgatggagtgggtagttcctcgggaaattggcattgcgattcccaatggctgggggacagagtcatcaccaccagcaccagaacctgggccttgcccacctacaataaccacctctacaagcaaatctccaacagcacatctggaggatcttcaaatgacaacgcctacttcggctacagcaccccctgggggtattttgactttaacagattccactgccacttttcaccacgtgactggcagcgactcatcaacaacaactggggattccgacccaagagactcaacttcaagctcttcaacatccaggtcaaggaggtcacgcagaacgaaggcaccaagaccatcgccaataacctcaccagcaccatccaggtgtttacggactcggagtaccagctgccgtacgttctcggctccgcccaccagggctgcctgcctccgttcccggcggacgtgttcatgattccccagtacggctacctaacgctcaacaacggtagtcaggccgtgggacgctcctccttctactgcctggaatactttccttcgcagatgctgagaaccggcaacaacttccagtttacttacaccttcgaggacgtgcctttccacagcagctacgcgcacagccagagcttggaccggctgatgaatcctctgattgaccagtacctgtactacttgtctcggactcaaacaacaggaggcacggcaaatacgcagactctgggcttcagccaaggtgggcctaatacaatggccaatcaggcaaagaactggctgccaggaccctgttaccgccaacaacgcgtctcaacgacaaccgggcaaaacaacaatagcaactttgcctggactgctgggaccaaataccatctgaatggaagaaattcattggctaatcctggcatcgctatggcaacacacaaagacgacaaggagcgtttttttcccagtaacgggatcctgatttttggcaaacaaaatgctgccagagacaatgcggattacagcgatgtcatgctcaccagcgaggaagaaatcaaaaccactaaccctgtggctacagaggaatacggtatcgtggcagataacttgcagcagcaaaacacggctcctcaaattggaactgtcaacagccagggggccttacccggtatggtctggcagaaccgggacgtgtacctgcagggtcccatctgggccaagattcctcacacggacggcaacttccacccgtctccgctgatgggcggctttggcctgaaacatcctccgcctcagatcctgatcaagaacacgcctgtacctgcggatcctccgaccaccttcaaccagtcaaagctgaactctttcatcacgcaatacagcaccggacaggtcagcgtggaaattgaatgggagctgcagaaggaaaacagcaagcgctggaaccccgagatccagtacacctccaactactacaaatctacaagtgtggactttgctgttaatacagaaggcgtgtactctgaaccccaccccattggcacccgttacctcacccgtcccctgtaa

SEQ ID NO: 1036 - DNA, 2214 bp, Artificial Sequence
  source: /note="Description of Artificial Sequence: Synthetic polynucleotide"
atggctgccgatggttatcttccagattggctcgaggacaaccttagtgaaggaattcgcgagtggtgggcgctgaaacctggagccccgaagcccaaagccaaccagcaaaagcaggacgacggccggggtctggtgcttcctggctacaagtacctcggacccttcaacggactcgacaagggggagcccgtcaacgcggcggacgcagcggccctcgagcacgacaaggcctacgaccagcagctcaaagcgggtgacaatccgtacctgcggtataaccacgccgacgcggagtttcaggagcgccttaaagaagatacgtcttttgggggcaacctcgggcgagcagtcttccaggccaagaagagggttctcgaaccttttggtctggttgaggaaggtgctaagacggctcctggaaagaaacgtccggtagagcagtcgccacaagagccagactcctcctcgggcatcggcaagacaggccagcagcccgctaaaaagagactcaattttggtcagactggcgactcagagtcagttccagaccctcaacctctcggagaacctccagcagcgccctctggtgtgggacctaatacaatggctgcaggcggtggcgcaccaatggcagacaataacgaaggtgccgatggagtgggtagttcctcgggaaattggcattgcgattcccaatggctggggaacagagtcatcaccaccagcacccgaacctgggccctgcccacctacaacaatcacctctacaagcaaatctccaacagcacatctggaggatcttcaaatgacaacgcctacttcggctacagcaccccctgggggtattttgacttcaacagattccactgccacttctcaccacgtgactggcagcgactcatcaacaacaactggggattccggcccaagagactcaacttcaagctcttcaacattcaggtcaaagaggttacggacaacaatggagtcaagaccatcgccaataaccttaccagcacggtccaggtcttcacggactcggagtaccagttgccgtacgtcctcggctctgcgcaccagggctgcctccctccgttcccggcggacgtgttcatgattccgcaatacggctacctgacgctcaacaacggtagccaagccgtgggacgttcatccttttactgcctggaatatttcccttctcagatgctgagaaccggcaacaacttccagtttacttacaccttcgaggacgtgcctttccacagcagctacgcgcacagccagagcttggaccggctgatgaatcctctgattgaccagtacctgtactacttgtctcggactcaaacaacaggaggcacggcaaatacgcagactctgggcttcagccaaggtgggcctaatacaatggccaatcaggcaaagaactggctgccaggaccctgttaccgccaacaacgcgtctcaacgacaaccgggcaaaacaacaatagcaactttgcctggactgctgggaccaaataccatctgaatggaagaaattcattggctaatcctggcatcgctatggcaacacacaaagacgacaaggagcgtttttttcccagtaacgggatcctgatttttggcaaacaaaatgctgccagagacaatgcggattacagcgatgtcatgctcaccagcgaggaagaaatcaaaaccactaaccctgtggctacagaggaatacggtatcgtggcagataacttgcagcagcaaaacacggctcctcaaattggaactgtcaacagccagggggccttacccggtatggtctggcagaaccgggacgtgtacctgcagggtcccatctgggccaagattcctcacacggacggcaacttccacccgtctccgctgatgggcggctttggcctgaaacatcctccgcctcagatcctgatcaagaacacgcctgtacctgcggatcctccgaccaccttcaaccagtcaaagctgaactctttcatcacgcaatacagcaccggacaggtcagcgtggaaattgaatgggagctgcagaaggaaaacagcaagcgctggaaccccgagatccagtacacctccaactactacaaatctacaagtgtggactttgctgttaatacagaaggcgtgtactctgaaccccaccccattggcacccgttacctcacccgtcccctgtaa

SEQ ID NO: 1037 - DNA, 2211 bp, Artificial Sequence
  source: /note="Description of Artificial Sequence: Synthetic polynucleotide"
atggctgccgatggttatcttccagattggctcgaggacaacctctctgagggcattcgcgagtggtgggacttgaaacctggagccccgaagcccaaagccaaccagcaaaagcaggacgacggccggggtctggtgcttcctggctacaagtacctcggacccttcaacggactcgacaggggggagcccgtcaacgcggcggacgcagcggccctcgagcacgacaaggcctacgaccagcagctcaaagcgggtgacaatccgtacctgcggtataaccacgccgacgccgagtttcaggagcgtctgcaagaagatacgtcttttgggggcaacctcgggcgagcagtcttccaggccaagaagcgggttctcgaacctctcggtctggttgaggaaggcgctaagacggctcctggaaagaaacgtccggtagagcagtcgccacaagagccagactcctcctcgggcatcggcaagacaggccagcagcccgctaaaaagagactcaattttggtcagactggcgactcagagtcagtccccgacccacaacctctcggagaacctccagcaacccccgctgctgtgggacctactacaatggcttcaggcggtggcgcaccaatggcagacaataacgaaggcgccgacggagtgggtaatgcctcaggaaattggcattgcgattccacatggctgggcgacagagtcatcaccaccagcacccgaacctgggccttgcccacctataacaaccacctctacaagcaaatctccagtgcttcaacgggggccagcaacgacaaccactacttcggctacagcaccccctgggggtattttgacttcaacagattccactgccacttctcaccacgtgactggcagcgactcatcaacaacaactggggattccggcctaagcgactcaacttcaagctcttcaacattcaggtcaaagaggttacggacaacaatggagtcaagaccatcgccaataacctcaccagcaccatccaggtgtttacggactcggagtaccagctgccgtacgttctcggctctgcccaccagggctgcctgcctccgttcccggcggacgtgttcatgattccccagtacggctacctaacactcaacaacggtagtcaggccgtgggacgctcctccttctactgcctggaatactttccttcgcagatgctgagaaccggcaacaacttccagtttacttacaccttcgaggacgtgcctttccacagcagctacgcccacagccagagcttggaccggctgatgaatcctctgattgaccagtacctgtactacttgtctcggactcaaacaacaggaggcacggcaaatacgcagactctgggcttcagccaaggtgggcctaatacaatggccaatcaggcaaagaactggctgccaggaccctgttaccgccaacaacgcgtctcaacgacaaccgggcaaaacaacaatagcaactttgcctggactgctgggaccaaataccatctgaatggaagaaattcattggctaatcctggcatcgctatggcaacacacaaagacgacaaggagcgtttttttcccagtaacgggatcctgatttttggcaaacaaaatgctgccagagacaatgcggattacagcgatgtcatgctcaccagcgaggaagaaatcaaaaccactaaccctgtggctacagaggaatacggtatcgtggcagataacttgcagcagcaaaacacggctcctcaaattggaactgtcaacagccagggggccttacccggtatggtctggcagaaccgggacgtgtacctgcagggtcccatctgggccaagattcctcacacggacggcaacttccacccgtctccgctgatgggcggctttggcctgaaacatcctccgcctcagatcctgatcaagaacacgcctgtacctgcggatcctccgaccaccttcaaccagtcaaagctgaactctttcatcacgcaatacagcaccggacaggtcagcgtggaaattgaatgggagctgcagaaggaaaacagcaagcgctggaaccccgagatccagtacacctccaactactacaaatctacaagtgtggactttgctgttaatacagaaggcgtgtactctgaaccccaccccattggcacccgttacctcacccgtcccctgtaa

SEQ ID NO: 1038 - DNA, 2211 bp, Artificial Sequence
  source: /note="Description of Artificial Sequence: Synthetic polynucleotide"
atggctgccgatggttatcttccagattggctcgaggacaacctctctgagggcattcgcgagtggtgggacttgaaacctggagccccgaagcccaaagccaaccagcaaaagcaggacgacggccggggtctggtgcttcctggctacaagtacctcggacccttcaacggactcgacaagggggagcccgtcaacgcggcggacgcagcggccctcgagcacgacaaggcctacgaccagcagctcaaagcgggtgacaatccgtacctgcggtataaccacgccgacgccgagtttcaggagcgtctgcaagaagatacgtcttttgggggcaacctcgggcgagcagtcttccaggccaagaagcgggttctcgaacctctcggtctggttgaggaaggcgctaagacggctcctggaaagaaacgtccggtagagcagtcgccacaagagccagactcctcctcgggcatcggcaagaaaggccaacagcccgccagaaaaagactcaattttggtcagactggcgactcagagtcagttccagaccctcaacctctcggagaacctcccgcagccccctcaggtgtgggatctcttacaatggcttcaggcggtggcgcaccaatggcagacaataacgaaggcgccgacggagtgggtaatgcctcaggaaattggcattgcgattccacatggctgggcgacagagtcatcaccaccagcacccgaacatgggccttgcccacttacaacaaccatctctacaagcaaatctccagtgcttcaacgggggccagcaacgacaaccactacttcggctacagcaccccctgggggtattttgatttcaacagattccactgccacttttcaccacgtgactggcaaagactcatcaacaacaactggggattccgacccaagagactcaacttcaagctctttaacattcaagtcaaagaggtcacgcagaatgaaggcaccaagaccatcgccaataaccttaccagcacggtccaggtcttcacggactcagactatcagctcccgtacgttctcggctccgcccaccagggctgcctgcctccgttcccggcggacgtgttcatgattccccagtacggctacctaacactcaacaacggtagtcaggccgtgggacgctcctccttctactgcctggaatactttccttcgcagatgctgagaaccggcaacaacttccagtttacttacacctttgaggacgttcctttccacagcagctacgctcacagccagagtctggaccgtctcatgaatcctctgattgaccagtacctgtactacttgtctcggactcaaacaacaggaggcacggcaaatacgcagactctgggcttcagccaaggtgggcctaatacaatggccaatcaggcaaagaactggctgccaggaccctgttaccgccaacaacgcgtctcaacgacaaccgggcaaaacaacaatagcaactttgcctggactgctggaaccaaataccatctgaatggaagaaattcattgtctaatcctggcatcgctatggcgacacacaaagacgacaaggagcgtttttttcccagtaacgggatcctgatttttggcaaacaaaatgctgccagagacaatgcggattacagcgatgtcatgctcaccagcgaggaagaaatcaaaaccactaaccctgtggctacagaggaatacggtatcgtggcagataacttgcagcagcaaaacacggctcctcaaattggaactgtcaacagccagggggccttacccggtatggtctggcagaaccgggacatgtacctgcagggtcccatctgggccaagattcctcacacggacggcaacttccacccgtctccgctgatgggcggctttggcctgaaacatcctccgcctcagatcctgatcaagaacacgcctgtacctgcggatcctccgaccaccttcaaccagtcaaagctgaactctttcatcacgcaatacagcaccggacaggtcagcgtggaaattgaatgggagctgcagaaggaaaacagcaagcgctggaaccccgagatccagtacacctccaactactacaaatctacaagtgtggactttgctgttaatacagaaggcgtgtactctgaaccccaccccattggcacccgttacctcacccgtcccctgtaa

SEQ ID NO: 1039 - DNA, 2211 bp, Artificial Sequence
  source: /note="Description of Artificial Sequence: Synthetic polynucleotide"
atggctgccgatggttatcttccagattggctcgaggacaacctctctgagggcattcgcgagtggtgggcgctgaaacctggagccccgaagcccaaagccaaccagcaaaagcaggacgacggccggggtctggtgcttcctggctacaagtacctcggacccttcaacggactcgacaagggggagcccgtcaacgcggcggatgcagcggccctcgagcacgacaaggcctacgaccagcagctcaaagcgggtgacaatccgtacctgcggtataaccacgccgacgccgagtttcaggagcgtctgcaggaagatacgtcttttgggggcaacctcgggcgagcagtcttccaggccaagaagagggttctcgaaccttttggtctggttgaggaaggcgctaagacggctcctggaaagaaacgtccggtagagcagtcgccacaagagccagactcctcctcgggcatcggcaagacaggccagcagcccgctaaaaagagactcaattttggtcagactggcggctcagagtcagtccccgacccacaacctctcggagaacctccagcaacccccgctgctgtgggacctactacaatggctgcaggcggtggcgcaccaatggcagacaataacgaaggcgccgacggagtgggtagttcctcgggaaattggcattgcgattccacatggctgggcgacagagtcatcaccaccagcaccagaacctgggccttgcccacctataacaaccacctctacaagcaaatctccagtgcttcaacgggggccagcaacgacaaccactacttcggctacagcaccccctgggggtattttgatttcaacagattccactgccatttctcaccacgtgactggcagcgactcatcaacaacaactggggattccggcccaagagactcaacttcaaactcttcaacattcaggtcaaagaggttacggacaacaatggagtcaagaccatcgccaataaccttaccagcacggtccaggtgtttacggactcggagtaccagctgccgtacgttctcggctctgcccaccagggctgcctccctccgttcccggcggacgtgttcatgattccgcagtacggctacctaacgctcaacaatggcagccaggcagtgggacggtcatccttttactgcctggaatatttcccttctcagatgctgagaacgggcaacaactttaccttcagctacacctttgaggaagtgcctttccacagcagctacgcgcacagccagagcctggaccggctgatgaatcctctgattgaccagtacctgtactacttgtctcggactcaaacaacaggaggcacggcaaatacgcagactctgggcttcagccaaggtgggcctaatacaatggccaatcaggcaaagaactggctgccaggaccctgttaccgccaacaacgcgtctcaacgacaaccgggcaaaacaacaatagcaactttgcctggactgctgggaccaaataccatctgaatggaagaaattcattggctaatcctggcatcgctatggcctcacacaaagacgacaaggagcgtttttttcccagtaacgggatcctgatttttggcaaacaaaatgctgccagagacaatgcggattacagcgatgtcatgctcaccagcgaggaagaaatcaaaaccactaaccctgtggctacagaggaatacggtatcgtggcagataacttgcagcagcaaaacacggctcctcaaattggaactgtcaacagccagggggccttacccggtatggtctggcagaaccgggacgtgtacctgcagggtcccatctgggccaagattcctcacacggacggcaacttccacccgtctccgctgatgggcggctttggcctgaaacatcctccgcctcagatcctgatcaagaacacgcctgtacctgcggatcctccgaccaccttcaaccagtcaaagctgaactctttcatcacgcaatacagcaccggacaggtcagcgtggaaattgaatgggagctgcagaaggaaaacagcaagcgctggaaccccgagatccagtacacctccaactactacaaatctacaagtgtggactttgctgttaatacagaaggcgtgtactctgaaccccaccccattggcacccgttacctcacccgtcccctgtaa

SEQ ID NO: 1040 - protein, 736 aa, Artificial Sequence
  source: /note="Description of Artificial Sequence: Synthetic polypeptide"
MAADGYLPDWLEDTLSEGIRQWWKLKPGPPPPKPAERHKDDSRGLVLPGYKYLGPFNGLDKGEPVNEADAAALEHDKAYDQQLKAGDNPYLKYNHADAEFQERLKEDTSFGGNLGRAVFQAKKRVLEPLGLVEEGAKTAPGKKRPVEQSPQEPDSSSGIGKTGQQPAKKRLNFGQTGDSESVPDPQPLGEPPATPAAVGPTTMASGGGAPMADNNEGADGVGSSSGNWHCDSQWLGDRVITTSTRTWALPTYNNHLYKQISSASTGASNDNHYFGYSTPWGYFDFNRFHCHFSPRDWQRLINNNWGFRPKRLNFKLFNIQVKEVTQNEGTKTIANNLTSTIQVFTDSEYQLPYVLGSAHQGCLPPFPADVFMIPQYGYLTLNNGSQAVGRSSFYCLEYFPSQMLRTGNNFQFTYTFEDVPFHSSYAHSQSLDRLMNPLIDQYLYYLSRTQTTGGTANTQTLGFSQGGPNTMANQAKNWLPGPCYRQQRVSTTTGQNNNSNFAWTAGTKYHLNGRNSLANPGIAMATHKDDKERFFPSNGILIFGKQNAARDNADYSDVMLTSEEEIKTTNPVATEEYGIVADNLQQQNTAPQIGTVNSQGALPGMVWQNRDVYLQGPIWAKIPHTDGNFHPSPLMGGFGLKHPPPQILIKNTPVPADPPTTFNQSKLNSFITQYSTGQVSVEIEWELQKENSKRWNPEIQYTSNYYKSTSVDFAVNTEGVYSEPHPIGTRYLTRPL

SEQ ID NO: 1041 - protein, 736 aa, Artificial Sequence
  source: /note="Description of Artificial Sequence: Synthetic polypeptide"
MAADGYLPDWLEDNLSEGIREWWALKPGAPKPKANQQKQDDGRGLVLPGYKYLGPFNGLDKGEPVNAADAAALEHDKAYDQQLKAGDNPYLKYNHADAEFQERLKEDTSFGGNLGRAVFQAKKRLLEPLGLVEEAAKTAPGKKRPVEQSPQEPDSSAGIGKSGAQPAKKRLNFGQTGDSESVPDPQPLGEPPATPAAVGPTTMASGGGAPMADNNEGADGVGNASGNWHCDSTWLGDRVITTSTRTWALPTYNNHLYKQISSASTGASNDNHYFGYSTPWGYFDFNRFHCHFSPRDWQRLINNNWGFRPKRLNFKLFNIQVKEVTQNEGTKTIANNLTSTIQVFTDSEYQLPYVLGSAHQGCLPPFPADVFMIPQYGYLTLNNGSQAVGRSSFYCLEYFPSQMLRTGNNFQFTYTFEDVPFHSSYAHSQSLDRLMNPLIDQYLYYLSRTQTTGGTANTQTLGFSQGGPNTMANQAKNWLPGPCYRQQRVSTTTGQNNNSNFAWTAGTKYHLNGRNSLANPGIAMATHKDDKERFFPSNGILIFGKQNAARDNADYSDVMLTSEEEIKATNPVATEEYGIVADNLQQQNTAPQIGTVNSQGALPGMVWQNRDVYLQGPIWAKIPHTDGNFHPSPLMGGFGLKHPPPQILIKNTPVPADPPTTFNQSKLNSFITQYSTGQVSVEIEWELQKENSKRWNPEIQYTSNYYKSTSVDFAVNTEGVYSEPHPIGTRYLTRPL

SEQ ID NO: 1042 - protein, 737 aa, Artificial Sequence
  source: /note="Description of Artificial Sequence: Synthetic polypeptide"
MAADGYLPDWLEDNLSEGIREWWDLKPGAPKPKANQQKQDDGRGLVLPGYKYLGPFNGLDKGEPVNAADAAALEHDKAYDQQLKAGDNPYLRYNHADAEFQERLQEDTSFGGNLGRAVFQAKKRVLEPLGLVEEGANTAPGKKRPVEQSPQEPDSSAGIGKSGAQPAKKRLNFGQTGDTESVPDPQPIGEPPAAPSGVGSLTMASGGGAPVADNNEGADGVGSSSGNWHCDSQWLGDRVITTSTRTWALPTYNNHLYKQISNSTSGGSSNDNAYFGYSTPWGYFDFNRFHCHFSPRDWQRLINNNWGFRPKRLNFKLFNIQVKEVTDNNGVKTIANNLTSTIQVFTDSEYQLPYVLGSAHQGCLPPFPADVFMIPQYGYLTLNNGSQAVGRSSFYCLEYFPSQMLRTGNNFQFTYTFEDVPFHSSYAHSQSLDRLMNPLIDQYLYYLSRTQTTGGTANTQTLGFSQGGPNTMANQAKNWLPGPCYRQQRVSTTTGQNNNSNFAWTAGTKYHLNGRNSLANPGIAMASHKDDKERFFPSNGILIFGKQNAARDNADYSDVMLTSEEEIKTTNPVATEEYGIVADNLQQQNTAPQIGTVNSQGALPGMVWQNRDVYLQGPIWAKIPHTDGNFHPSPLMGGFGLKHPPPQILIKNTPVPADPPTTFNQSKLNSFITQYSTGQVSVEIEWELQKENSKRWNPEIQYTTNYYKSTSVDFAVNTEGVYSEPHPIGTRYLTRPL

SEQ ID NO: 1043 - protein, 736 aa, Artificial Sequence
  source: /note="Description of Artificial Sequence: Synthetic polypeptide"
MAADGYLPDWLEDNLSEGIREWWALKPGAPKPKANQQKQDDGRGLVLPGYKYLGPFNGLDKGEPVNEADAAALEHDKAYDQQLKAGDNPYLRYNHADAEFQERLQEDTSFGGNLGRAVFQAKKRVLEPLGLVEEGAKTAPGKKRPVEQSPQEPDSSSGIGKTGQQPAKKRLNFGQTGDSESVPDPQPLGEPPATPAAVGPTTMASGGGAPMADNNEGADGVGNASGNWHCDSTWLGDRVITTSTRTWALPTYNNHLYKQISSASTGASNDNHYFGYSTPWGYFDFNRFHCHFSPRDWQRLINNNWGFRPKRLNFKLFNIQVKEVTQNEGTKTIANNLTSTIQVFTDSEYQLPYVLGSAHQGCLPPFPADVFMIPQYGYLTLNNGSQAVGRSSFYCLEYFPSQMLRTGNNFQFTYTFEDVPFHSSYAHSQSLDRLMNPLIDQYLYYLSRTQTTGGTANTQTLGFSQGGPNTMANQAKNWLPGPCYRQQRVSTTTGQNNNSNFAWTAGTKYHLNGRNSLANPGIAMATHKDDKERFFPSNGILIFGKQNAARDNADYSDVMLTSEEEIKTTNPVATEEYGIVADNLQQQNTAPQIGTVNSQGALPGMVWQNRDVYLQGPIWAKIPHTDGNFHPSPLMGGFGLKHPPPQILIKNTPVPADPPTTFNQSKLNSFITQYSTGQVSVEIEWELQKENSKRWNPEIQYTSNYYKSTSVDFAVNTEGVYSEPHPIGTRYLTRPL

SEQ ID NO: 1044 - protein, 736 aa, Artificial Sequence
  source: /note="Description of Artificial Sequence: Synthetic polypeptide"
MAADGYLPDWLEDNLSEGIREWWALKPGAPKPKANQQKQDDGRGLVLPGYKYLGPFNGLDKGEPVNEADAAALEHDKAYDQQLKAGDNPYLRYNHADAEFQERLQEDTSFGGNLGRAVFQAKKRVLEPFGLVEEGAKTAPGKKRPVEQSPQEPDSSSGIGKTGQQPAKKRLNFGQTGDSESVPDPQPLGEPPATPAAVGPTTMASGGGAPMADNNEGADGVGNASGNWHCDSQWLGDRVITTSTRTWALPTYNNHLYKQISSASTGASNDNHYFGYSTPWGYFDFNRFHCHFSPRDWQRLINNNWGFRPKRLNFKLFNIQVKEVTDNNGVKTIANNLTSTVQVFSDSEYQLPYVLGSAHQGCLPPFPADVFMIPQYGYLTLNNGSQAVGRSSFYCLEYFPSQMLRTGNNFQFTYTFEDVPFHSSYAHSQSLDRLMNPLIDQYLYYLSRTQTTGGTANTQTLGFSQGGPNTMANQAKNWLPGPCYRQQRVSTTTGQNNNSNFAWTAGTKYHLNGRNSLANPGIAMATHKDDKERFFPSNGILIFGKQNAARDNADYSDVMLTSEEEIKTTNPVATEEYGIVADNLQQQNTAPQIGTVNSQGALPGMVWQNRDVYLQGPIWAKIPHTDGNFHPSPLMGGFGLKHPPPQILIKNTPVPADPPTTFNQSKLNSFITQYSTGQVSVEIEWELQKENSKRWNPEIQYTSNYYKSTSVDFAVNTEGVYSEPHPIGTRYLTRPL

SEQ ID NO: 1045 - protein, 736 aa, Artificial Sequence
  source: /note="Description of Artificial Sequence: Synthetic polypeptide"
MAADGYLPDWLEDTLSEGIRQWWKLKPGPPPPKPAERHKDDSRGLVLPGYKYLGPFNGLDKGEPVNEADAAALEHDKAYDRQLDSGDNPYLKYNHADAEFQERLKEDTSFGGNLGRAVFQAKKRVLEPFGLVEEGAKTAPGKKRPVEQSPQEPDSSSGIGKTGQQPAKKRLNFGQTGDSESVPDPQPLGEPPATPAAVGPTTMASGGGAPMADNNEGADGVGNASGNWHCDSTWLGDRVITTSTRTWALPTYNNHLYKQISSASTGASNDNHYFGYSTPWGYFDFNRFHCHFSPRDWQRLINNNWGFRPKRLNFKLFNIQVKEVTDNNGVKTIANNLTSTVQVFTDSDYQLPYVLGSAHEGCLPPFPADVFMIPQYGYLTLNNGSQAVGRSSFYCLEYFPSQMLRTGNNFQFTYTFEDVPFHSSYAHSQSLDRLMNPLIDQYLYYLSRTQTTGGTANTQTLGFSQGGPNTMANQAKNWLPGPCYRQQRVSTTTGQNNNSNFAWTAGTKYHLNGRNSLANPGIAMATHKDDKERFFPSNGILIFGKQNAARDNADYSDVMLTSEEEIKTTNPVATEEYGIVADNLQQQNTAPQIGTVNSQGALPGMVWQNRDVYLQGPIWAKIPHTDGNFHPSPLMGGFGLKHPPPQILIKNTPVPADPPTTFNQSKLNSFITQYSTGQVSVEIEWELQKENSKRWNPEIQYTSNYYKSTSVDFAVNTEGVYSEPHPIGTRYLTRNL

SEQ ID NO: 1046 - protein, 738 aa, Artificial Sequence
  source: /note="Description of Artificial Sequence: Synthetic polypeptide"
MAADGYLPDWLEDNLSEGIREWWDLKPGAPKPKANQQKQDDGRGLVLPGYKYLGPFNGLDKGEPVNAADAAALEHDKAYDQQLQAGDNPYLRYNHADAEFQERLQEDTSFGGNLGRAVFQAKKRVLEPLGLVEEGAKTAPGKKRPVEPSPQRSPDSSTGIGKKGQQPARKRLNFGQTGDSESVPDPQPLGEPPAAPSGVGPNTMAAGGGAPMADNNEGADGVGSSSGNWHCDSQWLGDRVITTSTRTWALPTYNNHLYKQISNSTSGGSSNDNAYFGYSTPWGYFDFNRFHCHFSPRDWQRLINNNWGFRPKRLSFKLFNIQVKEVTQNEGTKTIANNLTSTIQVFTDSEYQLPYVLGSAHQGCLPPFPADVFMIPQYGYLTLNNGSQAVGRSSFYCLEYFPSQMLRTGNNFTFSYTFEDVPFHSSYAHSQSLDRLMNPLIDQYLYYLSRTQTTGGTANTQTLGFSQGGPNTMANQAKNWLPGPCYRQQRVSTTTGQNNNSNFAWTAGTKYHLNGRNSLANPGIAMATHKDDKERFFPSNGILIFGKQNAARDNADYSDVMLTSEEEIKTTNPVATEEYGIVADNLQQQNTAPQIGTVNSQGALPGMVWQNRDVYLQGPIWAKIPHTDGNFHPSPLMGGFGLKHPPPQILIKNTPVPADPPTTFNQSKLNSFITQYSTGQVSVEIEWELQKENSKRWNPEIQYTSNYYKSTSVDFAVNTEGVYSEPHPIGTRYLTRPL

SEQ ID NO: 1047 - protein, 737 aa, Artificial Sequence
  source: /note="Description of Artificial Sequence: Synthetic polypeptide"
MAADGYLPDWLEDNLSEGIREWWDLKPGAPKPKANQQKQDDGRGLVLPGYKYLGPFNGLDKGEPVNAADAAALEHDKAYDQQLKAGDNPYLRYNHADAEFQERLQEDTSFGGNLGRAVFQAKKRVLEPFGLVEEGAKTAPGKKRPVEQSPQEPDSSSGIGKTGQQPAKKRLNFGQTGDSESVPDPQPLGEPPATPAAVGPTTMASGGGAPMQDNNEGADGVGSSSGNWHCDSTWLGDRVITTSTRTWALPTYNNHLYKQISNGTSGGATNDNTYFGYSTPWGYFDFNRFHCHFSPRDWQRLINNNWGFRPKRLNFKLFNIQVKEVTQNEGTKTIANNLTSTIQVFTDSEYQLPYVLGSAHQGCLPPFPADVFMIPQYGYLTLNNGSQAVGRSSFYCLEYFPSQMLRTGNNFTFSYTFEDVPFHSSYAHSQSLDRLMNPLIDQYLYYLSRTQTTGGTANTQTLGFSQGGPNTMANQAKNWLPGPCYRQQRVSTTTGQNNNSNFAWTAGTKYHLNGRNSLANPGIAMATHKDDKERFFPSNGILIFGKQNAARDNADYSDVMLTSEEEIKTTNPVATEEYGIVADNLQQQNTAPQIGTVNSQGALPGMVWQNRDVYLQGPIWAKIPHTDGNFHPSPLMGGFGLKHPPPQILIKNTPVPADPPTTFNQSKLNSFITQYSTGQVSVEIEWELQKENSKRWNPEIQYTSNYYKSTSVDFAVNTEGVYSEPHPIGTRYLTRPL

SEQ ID NO: 1048 - protein, 736 aa, Artificial Sequence
  source: /note="Description of Artificial Sequence: Synthetic polypeptide"
MAADGYLPDWLEDNLSEGIREWWALKPGAPKPKANQQKQDDGRGLVLPGYKYLGPFNGLDKGEPVNAADAAALEHDKAYDQQLKAGDNPYLRYNHADAEFQERLQEDTSFGGNLGRAVFQAKKRVLEPLGLVEEGAKTAPGKKRPVEQSPQEPDSSSGIGKTGQQPAKKRLNFGQTGDSESVPDPQPLGEPPATPAAVGPTTMASGGGAPMADNNEGADGVGSSSGNWHCDSTWLGDRVITTSTRTWALPTYNNHLYKQISSASTGASNDNHYFGYSTPWGYFDFNRFHCHFSPRDWQRLINNNWGFRPKRLNFKLFNIQVKEVTDNNGVKTIANNLTSTVQVFTDSDYQLPYVLGSAHEGCLPPFPADVFMIPQYGYLTLNNGSQAVGRSSFYCLEYFPSQMLRTGNNFTFSYTFEDVPFHSSYAHSQSLDRLMNPLIDQYLYYLSRTQTTGGTANTQTLGFSQGGPNTMANQAKNWLPGPCYRQQRVSTTTGQNNNSNFAWTAGTKYHLNGRNSLANPGIAMATHKDDKERFFPSNGILIFGKQNAARDNADYSDVMLTSEEEIKTTNPVATEEYGIVADNLQQQNTAPQIGTVNSQGALPGMVWQNRDVYLQGPIWAKIPHTDGNFHPSPLMGGFGLKHPPPQILIKNTPVPADPPTTFNQSKLNSFITQYSTGQVSVEIEWELQKENSKRWNPEIQYTSNYYKSTSVDFAVNTEGVYSEPHPIGTRYLTRPL

SEQ ID NO: 1049 - protein, 737 aa, Artificial Sequence
  source: /note="Description of Artificial Sequence: Synthetic polypeptide"
MAADGYLPDWLEDNLSEGIREWWDLKPGAPKPKANQQKQDDGRGLVLPGYKYLGPFNGLDKGEPVNAADAAALEHDKAYDQQLKAGDNPYLRYNHADAEFQERLQEDTSFGGNLGRAVFQAKKRVLEPLGLVEEGAKTAPGKKRPVEPSPQRSPDSSTGIGKKGQQPARKRLNFGQTGDSESVPDPQPLGEPPATPAAVGPTTMASGGGAPMADNNEGADGVGNASGNWHCDSTWLGDRVITTSTRTWALPTYNNHLYKQISSASTGASNDNHYFGYSTPWGYFDFNRFHCHFSPRDWQRLINNNLGSRPKRLNFKLFIIQVKEVTTNDGVTTIANNLTSTVQVFSDSEYQLPYVLGSAHQGCLPPFPADVFMIPQYGYLTLNNGSQAVGRSSFYCLEYFPSQMLRTGNNFTFSYTFEDVPFHSSYAHSQSLDRLMNPLIDQYLYYLNRTQNQSGSAQNKDLLFSRGSPAGMSVQPKNWLPGPCYRQQRVSKTKTDNNNSNFTWTGASKYNLNGRESIINPGTAMASHKDDKDKFFPMSGVMIFGKESAGASNTALDNVMITDEEEIKATNPVATERFGTVAVNLQSSSTDPATGDVHVMGALPGMVWQDRDVYLQGPIWAKIPHTDGHFHPSPLMGGFGLKHPPPQILIKNTPVPANPPAEFSATKFASFITQYSTGQVSVEIEWELQKENSKRWNPEVQYTSNYAKSANVDFTVDNNGLYTEPRPIGTRYLTRPL

SEQ ID NO: 1050 - protein, 736 aa, Artificial Sequence
  source: /note="Description of Artificial Sequence: Synthetic polypeptide"
MAADGYLPDWLEDNLSEGIREWWALKPGAPKPKANQQKQDDGRGLVLPGYKYLGPFNGLDKGEPVNAADAAALEHDKAYDQQLKAGDNPYLRYNHADAEFQERLQEDTSFGGNLGRAVFQAKKRLLEPLGLVEEAAKTAPGKKRPVEQSPQEPDSSSGIGKTGQQPAKKRLNFGQTGDSESVPDPQPIGEPPATPAAVGPTTMASGGGAPMADNNEGADGVGNSSGNWHCDSTWLGDRVITTSTRTWALPTYNNHLYKQISSASTGASNDNHYFGYSTPWGYFDFNRFHCHFSPRDWQRLINNNWGFRPKRLNFKLFNIQVKEVTQNEGTKTIANNLTSTIQVFTDSEYQLPYVLGSAHQGCLPPFPADVFMIPQYGYLTLNNGSQAVGRSSFYCLEYFPSQMLRTGNNFTFSYTFEDVPFHSSYAHSQSLDRLMNPLIDQYLYYLSRTQTTGGTANTQTLGFSQGGPNTMANQAKNWLPGPCYRQQRVSTTTGQNNNSNFAWTAGTKYHLNGRNSLANPGIAMATHKDDKERFFPSNGILIFGKQNAARDNADYSDVMLTSEEEIKTTNPVATEEYGIVADNLQQQNTAPQIGTVNSQGALPGMVWQNRDVYLQGPIWAKIPHTDGNFHPSPLMGGFGLKHPPPQILIKNTPVPADPPTTFNQSKLNSFITQYSTGQVSVEIEWELQKENSKRWNPEIQYTSNYYKSTSVDFAVNTEGVYSDPHPIGTRYLTRPL

SEQ ID NO: 1051 - protein, 736 aa, Artificial Sequence
  source: /note="Description of Artificial Sequence: Synthetic polypeptide"
MAADGYLPDWLEDNLSEGIREWWALKPGAPKPKANQQEQDDGRGLVLPGYKYLGPFNGLDKGEPVNAADAAALEHDKAYDQQLKAGDNPYLRYNHADAEFQERLQEDTSFGGNLGRAVFQAKKRVLEPFGLVEEGAKTAPGKKRPVEQSPQEPDSSSGIGKTGQQPAKKRLNFGQTGDSESVPDPQPLGEPPAAPSGVGPNTMAAGGGAPMADNNEGADGVGSSSGNWHCDSTWLGDRVITTSTRTWALPTYNNHLYKQISSASTGASNDNHYFGYSTPWGYFDFNRFHCHFSPRDWQRLINNNWGFRPKRLNFKLFNIQVKEVTQNEGTKTIANNLTSTIQVFTDSEYQLPYVLGSAHQGCLPPFPADVFMIPQYGYLTLNNGSQAVGRSSFFCLEYFPSQMLRTGNNFTFSYTFEDVPFHSSYAHSQSLDRLMNPLIDQYLYYLSRTQTTGGTANTQTLGFSQGGPNTMANQAKNWLPGPCYRQQRVSTTTGQNNNSNFAWTAGTKYHLNGRNSLANPGIAMATHKDDKERFFPSNGILIFGKQNAARDNADYSDVMLTSEEEIKTTNPVATEEYGIVADNLQQQNTAPQIGTVNSQGALPGMVWQNRDVYLQGPIWAKIPHTDGNFHPSPLMGGFGLKHPPPQILIKNTPVPADPPTTFNQSKLNSFITQYSTGQVSVEIEWELQKENSKRWNPEIQYTSNYYKSTSVDFAVNTEGVYSEPHPIGTRYLTRPL

SEQ ID NO: 1052 - protein, 736 aa, Artificial Sequence
  source: /note="Description of Artificial Sequence: Synthetic polypeptide"
MAADGYLPDWLEDNLSEGIREWWDLKPGAPKPKANQQKQDDGRGLVLPGYKYLGPFNGLDKGEPVNAADAAALEHDKAYDQQLKAGDNPYLRYNHADAEFQERLQEDTSFGGNLGRAVFQAKKRVLEPLGLVEEGAKTAPGKKRPVEQSPQEPDSSSGIGKTGQQPAKKRLNFGQTGDSESVPDPQPLGEPPATPAAVGPTTMASGGGAPMADNNEGADGVGNASGNWHCDSTWLGDRVITTSTRTWALPTYNNHLYKQISSASTGASNDNHYFGYSTPWGYFDFNRFHCHFSPRDWQRLINNNWGFRPKRLNFKLFNIQVKEVTTNDGVTTIANNLTSTVQVFSDSEYQLPYVLGSAHQGCLPPFPADVFMIPQYGYLTLNNGSQAVGRSSFYCLEYFPSQMLRTGNNFTFSYTFEDVPFHSSYAHSQSLDRLMNPLIDQYLYYLNRTQNQSGSAQNKDLLFSRGSPAGMSVQPKNWLPGPCYRQQRVSKTKTDNNNSNFTWTGASKYNLNGRESIINPGTAMASHKDDKDKFFPMSGVMIFGKESAGASNTALDNVMITDEEEIKATNPVATERFGTVAVNLQNSSTDPATGDVHVMGALPGMVWQDRDVYLQGPIWAKIPHTDGHFHPSPLMGGFGLKHPPPQILIKNTPVPANPPAEFSATKFASFITQYSTGQVSVEIEWELQKENSKRWNPEVQYTSNYAKSANVDFTVDNNGLYTVPRPIGTRYLTRPL

SEQ ID NO: 1053 - protein, 736 aa, Artificial Sequence
  source: /note="Description of Artificial Sequence: Synthetic polypeptide"
MAADGYLPDWLEDNLSEGIREWWALKPGAPKPKANQQKQDDGRGLVLPGYKYLGPFNGLDKGEPVNAADAAALEHDKAYDQQLKAGDNPYLRYNHADAEFQERLQEDTSFGGNLGRAVFQAKKRLLEPLGLVEEGAKTAPGKKRPVEQSPQEPDSSSGIGKTGEQPAKKRLNFGQTGDSESVPDPQPLGEPPATPAAVGPTTMASGGGAPMADNNEGADGVGSASGNWHCDSTWLGDRVITTSTRTWALPTYNNHLYKQISSASTGASNDNHYFGYSTPWGYFDFNRFHCHFSPRDWQRLINNNWGFRPKRLNFKLFNIQVKEVTDNNGVKTIANNLTSTIQVFTDSEYQLPYVLGSAHQGCLPPFPADVFMIPQYGYLTLNNGSQAVGRSSFYCLEYFPSQMLRTGNNFPFSYTFEDVPFHSSYAHSQSLDRLMNPLIDQYLYYLSRTQTTGGTANTQTLGFSQGGPNTMANQAKNWLPGPCYRQQRVSTTTGQNNNSNFAWTAGTKYHLNGRNSLANPGIAMATHKDDKERFFPSNGILIFGKQNAARDNADYSDVMLTSEEEIKTTNPVATEEYGIVADNLQQQNTAPQIGTVNSQGALPGMVWQNRDVYLQGPIWAKIPHTDGNFHPSPLMGGFGLKHPPPQILIKNTPVPADPPTTFNQSKLNSFITQYSTGQVSVEIEWELQKENSKRWNPEIQYTSNYYKSTSVDFAVNTEGVYSEPHPIGTRYLTRPL

SEQ ID NO: 1054 - protein, 736 aa, Artificial Sequence
  source: /note="Description of Artificial Sequence: Synthetic polypeptide"
MAADGYLPDWLEDNLSEGIREWWALKPGAPKPKANQQKQDDGRGLVLPGYKYLGPFNGLDKGEPVNAADAAALEHDKAYDQQLKAGDNPYLRYNHADAEFQERLQEDTSFGGNLGRAVFQAKKRVLEPLGLVEEGAKTAPGKKRPVEQSPQEPDSSSGIGKTGQQPAKKRLNFGQTGDSESVPDPQPLGEPPATPAAVGPTTMASGGGAPMADNNEGADGVGSSSGNWHCDSQWLGDRVITTSTRTWALPTYNNHLYKQISSASTGASNDNHYFGYSTPWGYFDFNRFHCHFSPRDWQRLINNNWGFRPKRLNFKLFNIQVKEVTDNNGVKTIANNLTSTVQVFTDSEYQLPYVLGSAHQDCLPPFPADVFMIPQYGYLTLNNGSQAVGRSSFYCLEYFPSQMLRTGNNFTFSYTFEDVPFHSSYAHSQSLDRLMNPLIDQYLYYLSRTQTTGGTANTQTLGFSQGGPNTMANQAKNWLPGPCYRQQRVSTTTGQNNNSNFAWTAGTKYHLNGRNSLANPGIAMATHKDDKERFFPSNGILIFGKQNAARDNADYSDVMLTSEEEIKTTNPVATEEYGIVADNLQQQNTAPQIGTVNSQGALPGMVWQNRDVYLQGPIWAKIPHTDGNFHPSPLMGGFGLKHPPPQILIKNTPVPADPPTTFNQSKLNSFITQYSTGQVSVEIEWELQKENSKRWNPEIQYTSNYYKSTSVDFAVNTEGVYSEPHPIGTRYLTRPL

SEQ ID NO: 1055 - protein, 735 aa, Artificial Sequence
  source: /note="Description of Artificial Sequence: Synthetic polypeptide"
MAADGYLPDWLEDNLSEGIREWWDLKPGAPKPKANQQKQDDGRGLVLPGYKYLGPFNGLDKGEPVNAADAAALEHDKAYDQQLKAGDNPYLRYNHADAEFQERLQEDTSFGGNLGRAVFQAKKRVLEPLGLVEEGAKTAPGKKRPVEQSPQEPDSSSGIGKTGQQPAKKRLNFGQTGDSESVPDPQPLGEPPATPAAVGPTTMASGGGAPMADNNEGADGVGNASGNWHCDSTWLGDVITTSTRTWALPTYNNHLYKQISSASTGASNDNHYFGYSTPWGYFDFNRFHCHFSPRDWQRLINNNWGFRPKRLNFKLFNIQVKEVTQNEGTKTIANNLTSTIQVFTDSEYQLPYVLGSAHQGCLPPFPADVFMIPQYGYLTLNNGSQAVGRSSFYCLEYFPSQMLRTGNNFQFTYTFEDVPFHSSYAHSQSLDRLMNPLIDQYLYYLSRTQTTGGTANTQTLGFSQGGPNTMANQAKNWLPGPCYRQQRVSTTTGQNNNSNFAWTAGTKYHLNGRNSLANPGIAMATHKDDKERFFPSNGILIFGKQNAARDNADYSDVILTSEEEIKTTNPVATEEYGIVADNLQQQNTAPQIGTVNSQGALPGMVWQNRDVYLQGPIWAKIPHTDGNFHPSPLMGGFGLKHPPPQILIKNTPVPADPPTTFNQSKLNSFITQYSTGQVSVEIEWELQKENSKRWNPEIQYTSNYYKSTSVDFAVNTEGVYSEPHPIGTRYLTRPL

SEQ ID NO: 1056 - protein, 736 aa, Artificial Sequence
  source: /note="Description of Artificial Sequence: Synthetic polypeptide"
MAADGYLPDWLEDTLSEGIRQWWKLKPGPPPPKPAERHKDDSRGLVLPGYKYLGPFNGLDKGEPVNEADAAALEHDKAYDRQLDSGDNPYLKYNHADAEFQERLKEDTSFGGNLGRAVFQAKKRVLEPFGLVEEGAKTAPGKKRPVEQSPQEPDSSSGIGKTGQQPAKKRLNFGQTGDSESVPDPQPLGEPPATPAAVGPTTMASGGGAPMADNNEGADGVGNASGNWHCDSTWLGDRVITTSTRTWALPTYNNHLYKQISSTSTGASNDNHYFGYSTPWGYFDFNRFHCHFSPRDWQRLINNNWGFRPKRLNFKLFNIQVKEVTDNNGVKTIANNLTSTVQVFTDSEYQLPYVLGSAHQGCLPPFPADVFMIPQYGYLTLNNGSQAVGRSSFYCLEYFPSQMLRTGNNFTFSYTFEDVPFHSSYAHSQSLDRLMNPLIDQYLYYLSRTQTTGGTANTQTLGFSQGGPNTMANQAKNWLPGPCYRQQRVSTTTGQNNNSNFAWTAGTKYHLNGRNSLANPGIAMATHKDDKERFFPSNGILIFGKQNAARDNADYSDVMLTSEEEIKTTNPVATEEYGIVADNLQQQNTAPQIGTVNSQGALPGMVWQNRDVYLQGPIWAKIPHTDGNFHPSPLMGGFGLKHPPPQILIKNTPVPADPPTTFNQSKLNSFITQYSTGQVSVEIEWELQKENSKRWNPEIQYTSNYYKSTSVDFAVNTEGVYSEPHPIGTRYLTRPL

SEQ ID NO: 1057 - protein, 735 aa, Artificial Sequence
  source: /note="Description of Artificial Sequence: Synthetic polypeptide"
MAADGYLPDWLEDNLSEGIREWWDLKPGAPKPKANQQKQDDGRGLVLPGYKYLGPFNGLDKGEPVNAADAAALEHDKAYDRQLDSGDNPYLRYNHADAEFQERLKEDTSFGGNLGRAVFQAKKRVLEPFGLVEEGAKTAPGKKRPVEQSPQEPDSSSGIGKTGQQPAKKRLNFGQTGDSESVPDPQPLGEPPATPAAVGPTTMASGGGAPMADNNEGADGVGNASGNWHCDSTWLGDRVITTSTRTWALPTYNNHLYKQISSASTGASNDNHYFGYSTPWGYFDFNRFHCHFSPRDWQRLINNNWGFRPKRLNFKLFNIQVKEVTQNEGTKTIANNLTSTIQVFTDSEYQLPYVLGSAHQGCLPPFPADVFMIPQYGYLTLNNGSQAVGRSSFYCLEYFPSQMLRTGNNFQFTYTFEDVPFHSSYAHSQSLDRLMNPLIDQYLYYLSRTQTTGGTANTQTLGFSQGGPNTMANQAKNWLPGPCYRQQRVSTTTGQNNNSNFAWTAGTKYHLNGRNSLANPGIAMATHKDDRSVFFQYRDPDFGKQNAARDNADYSDVMLTSEEEIKTTNPVATEEYGIVADNLQQQNTAPQIGTVNSQGALPGMVWQNRDVYLQGPIWAKIPHTDGNFHPSPLMGGFGLKHPPPQILIKNTPVPADPPTTFNQSKLNSFITQYSTGQVSVEIEWELQKENSKRWNPEIQYTSNYYKSTSVDFAVNTEGVYSEPHPIGTRYLTRPL

SEQ ID NO: 1058 - protein, 736 aa, Artificial Sequence
  source: /note="Description of Artificial Sequence: Synthetic polypeptide"
MAADGYLPDWLEDNLSEGIREWWALKPGAPKPKANQQKQDDGRGLVLPGYKYLGPFNGLDKGEPVNAADAAALEHDKAYDQQLKAGDNPYLKYNHADAEFQERLQGDTSFGGNLGRAVFQAKKRVLEPLGLVEEAAKTAPGKKRPVEQSPQEPDSSAGIGKSGAQPAKKRLNFGQTGDTESVPDPQPLGEPPAAPSGVGPNTMAAGGGAPMADNNEGADGVGSSSGNWHCDSQWLGDRVITTSTRTWALPTYNNHLYKQISSASTGASNDNHYFGYSTPWGYFDFNRFHCHFSPRDWQRLINNNWGFRPKRLNFKLFNIQVKEVTDNNGVKTIANNLTSTVQVFTDSDYQLPYVLGSAHEGCLPPFPADVFMIPQYGYLTLNNGSQAVGRSSFYCLEYFPSQMLRTGNNFQFTYTFEDVPFHSSYAHSQSLDRLMNPLIDQYLYYLSRTQTTGGTANTQTLGFSQGGPNTMANQAKNWLPGPCYRQQRVSTTTGQNNNSNFAWTAGTKYHLNGRNSLANPGIAMATHKDDKERFFPSNGILIFGKQNAARDNADYSDVMLTSEEEIKTTNPVATEEYGIVADNLQQQNTAPQIGTVNSQGALPGMVWQNRDVYLQGPIWAKIPHTDGNFHPSPLMGGFGLKHPPPQILIKNTPVPADPPTTFNQSKLNSFITQYSTGQVSVEIEWELQKENSKRWNPEIQYTSNYYKSTSVDFAVNTEGVYSEPHPIGTRYLTRPL

SEQ ID NO: 1059 - protein, 736 aa, Artificial Sequence
  source: /note="Description of Artificial Sequence: Synthetic polypeptide"
MAADGYLPDWLEDTLSEGIRQWWKLKPGPPPPKPAERHKDDSRGLVLPGYKYLGPFNGLDKGEPVNEADAAALEHDKAYDRQLDSGDNPYLKYNHADAEFQERLKEDTSFGGNLGRAVFQAKKRVLEPFGLVEEAAKTAPGKKRPVEQSPQEPDSSSGIGKTGQQPAKKRLNFGQTGDSESVPDPQPLGEPPATPAAVGPTTMASGGGAPMADNNEGADGVGNASGNWHCDSTWLGDRVITTSTRTWALPTYNNHLYKQISSASTGASNDNHYFGYSTPWGYFDFNRFHCHFSPRDWQRLINNNWGFRPKRLNFKLFNIQVKEVTDNNGVKTIANNLTSTVQVFTDSDYQLPYVLGSAHEGCLPPFPADVFMIPQYGYLTLNNGSQAVGRSSFYCLEYFPSQMLRTGNNFTFSYTFEDVPFHSSYAHSQSLDRLMNPLIDQYLYYLSRTQTTGGTANTQTLGFSQGGPNTMANQAKNWLPGPCYRQQRVSTTTGQNNNSNFAWTAGTKYHLNGRNSLANPGIAMATHKDDKERFFPSNGILIFGKQNAARDNADYSDVMLTSEEEIKTTNPVATEEYGIVADNLQQQNTAPQIGTVNSQGALPGMVWQNRDVYLQGPIWAKIPHTDGNFHPSPLMGGFGLKHPPPQILIKNTPVPADPPTTFNQSKLNSFITQYSTGQVSVEIEWELQKENSKRWNPEIQYTSNYYKSTSVDFAVNTEGVYSEPHPIGTRYLTRPL

SEQ ID NO: 1060 - protein, 736 aa, Artificial Sequence
  source: /note="Description of Artificial Sequence: Synthetic polypeptide"
MAADGYLPDWLEDNLSEGIREWWALKPGAPKPKANQQKQDDGRGLVLPGYKYLGPFNGLDKGEPVNAADAAALEHDKAYDQQLKAGDNPYLRYNHADAEFQERLQEDTSFGGNLGRAVFQAKKRVLEPLGLVEEGAKTAPGKKRPVEQSPQEPDSSSGIGKTGQQPAKKRLNFGQTGDSESVPDPQPLGEPPATPAAVGPTTMASGGGAPMADNNEGADGVGSSSGNWHCDSTWLGDRVITTSTRTWALPTYNNHLYKQISSASTGASNDNHYFGYSTPWGYFDFNRFHCHFSPRDWQRLINNNWGFRPKRLNFKLFNIQVKEVTDNNGVKTIANNLTSTVQVFTDSEYQLPYVLGSAHQGCLPPFPADVFMIPQYGYLTLNNGSQAVGRSSFYCLEYFPSQMLRTGNNFTFSYTFEDVPFHSSYAHSQSLDRLMNPLIDQYLYYLSRTQTTGGTANTQTLGFSQGGPNTMANQAKNWLPGPCYRQQRVSTTTGQNNNSNFAWTAGTKYHLNGRNSLANPGIAMATHKDDKERFFPSNGILIFGKQNAARDNADYSDVMLTSEEEIKTTNPVATEEYGIVADNLQQQNTAPQIGTVNSQGALPGMVWQNRDVYLQGPIWAKIPHTDGNFHPSPLMGGFGLKHPPPQILIKNTPVPADPPTTFNQSKLNSFITQYSTGQVSVEIEWELQKENSKRWNPEIQYTSNYYKSTSVDFAVNTEGVYSEPHPIGTRYLTRPL

SEQ ID NO: 1061 - protein, 737 aa, Artificial Sequence
  source: /note="Description of Artificial Sequence: Synthetic polypeptide"
MAADGYLPDWLEDNLSEGIREWWALKPGAPKPKANQQKQDDGRGLVLPGYKYLGPFNGLDKGEPVNAADAAALEHDKAYDQQLKAGDNPYLRYNHADAEFQERLQEDTSFGGNLGRAVFQAKKRVLEPLGLVEEGAKTAPGKKRPVEQSPQEPDSSSGIGKTGQQPAKKRLNFGQTGDTESVPDPQPIGEPPAAPSGVGSLTMASGGGAPVADNNEGADGVGSSSGNWHCDSQWLGDRVITTSTRTWALPTYNNHLYKQISNSTSGGSSNDNAYFGYSTPWGYFDFNRFHCHFSPRDWQRLINNNWGFRPKRLNFKLFNIQVKEVTQNEGTKTIANNLTSTIQVFTDSEYQLPYVLGSAHQGCLPPFPADVFMIPQYGYLTLNNGSQAVGRSSFYCLEYFPSQMLRTGNNFQFTYTFEDVPFHSSYAHSQSLDRLMNPLIDQYLYYLSRTQTTGGTANTQTLGFSQGGPNTMANQAKNWLPGPCYRQQRVSTTTGQNNNSNFAWTAGTKYHLNGRNSLANPGIAMATHKDDKERFFPSNGILIFGKQNAARDNADYSDVMLTSEEEIKTTNPVATEEYGIVADNLQQQNTAPQIGTVNSQGALPGMVWQNRDVYLQGPIWAKIPHTDGNFHPSPLMGGFGLKHPPPQILIKNTPVPADPPTTFNQSKLNSFITQYSTGQVSVEIEWELQKENSKRWNPEIQYTSNYYKSTSVDFAVNTEGVYSEPHPIGTRYLTRPL

SEQ ID NO: 1062 - protein, 736 aa, Artificial Sequence
  source: /note="Description of Artificial Sequence: Synthetic polypeptide"
MAADGYLPDWLEDNLSEGIREWWALKPGAPKPKANQQKQDDGRGLVLPGYKYLGPFNGLDKGEPVNAADAAALEHDKAYDQQLKAGDNPYLKYNHADAEFQERLQGDTSFGGNLGRAVFQAKKRVLEPLGLVEEAAKTAPGKKRPVEQSPQEPDSSAGIGKSGAQPAKKRLNFGQTGDTESVPDPQPLGEPPAAPSGVGPNTMAAGGGAPMADNNEGADGVGSSSGNWHCDSQWLGDRVITTSTRTWALPTYNNHLYKQISSASTGASNDNHYFGYSTPWGYFDFNRFHCHFSPRDWQRLINNNWGFRPKRLNFKLFNIQVKEVTDNNGVKTIANNLTSTVQVFTDSEYQLPYVLGSAHQGCLPPFPADVFMIPQYGYLTLNNGSQAVGRSSFYCLEYFPSQMLRTGNNFTFSYTFEDVPFHSSYAHSQSLDRLMNPLIDQYLYYLSRTQTTGGTANTQTLGFSQGGPNTMANQAKNWLPGPCYRQQRVSTTTGQNNNSNFAWTAGTKYHLNGRNSLANPGIAMATHKDDKERFFPSNGILIFDKQNAARDNADYSDVMLTSEEEIKTTNPVATEEYGIVADNLQQQNTAPQIGTVNSQGALPGMVWQNRDVYLQGPIWAKIPHTDGNFHPSPLMGGFGLKHPPPQILIKNTPVPADPPTTFNQSKLNSFITQYSTGQVSVEIEWELQKENSKRWNPEIQYTSNYYKSTSVDFAVNTEGVYSEPHPIGTRYLTRPL

SEQ ID NO: 1063 - protein, 736 aa, Artificial Sequence
  source: /note="Description of Artificial Sequence: Synthetic polypeptide"
MAADGYLPDWLEDTLSEGIRQWWKLKPGPPPPKPAERHKDDSRGLVLPGYKYLGPFNGLDKGEPVNEADAAALEHDKAYDRQLDSGDNPYLKYNHADAEFQERLKEDTSFGGNLGRAVFQAKKRVLEPLGLVEEPVKTAPGKKRPVEHSPVEPDSSSGTGKAGQQPARKRLNFGQTGDSESVPDPQPLGEPPATPAAVGPNTMATGSGAPMADNNEGADGVGNSSGNWHCDSTWMGDRVITTSTRTWALPTYNNHLYKQISSASTGASNDNHYFGYSTPWGYFDFNRFHCHFSPRDWQRLINNNWGFRPKRLNFKLFNIQVKEVTDNNGVKTIANNLTSTIQVFTDSEYQLPYVLGSAHQGCLPPFPADVFMIPQYGYLTLNNGSQAVGRSSFYCLEYFPSQMLRTGNNFTFSYTFEDVPFHSSYAHSQSLDRLMNPLIDQYLYYLSRTQTTGGKANTQTLGFSQGGPNTMANQAKNWLPGPCYRQQRVSTTTGQNNNSNFAWTAGTKYHLNGRNSLANPGIAMATHKDDKERFFPSNGILIFGKQNAARDNADYSDVMLTSEEEIKTTNPVATEEYGIVADNLQQQNTAPQIGTVNSQGALPGMVWQNRDVYLQGPIWAKIPHTDGNFHPSPLMGGFGLKHPPPQILIKNTPVPADPPTTFNQSKLNSFITQYSTGQVSVEIEWELQKENSKRWNPEIQYTSNYYKSTSVDFAVNTEGVYSEPHPIGTRYLTRPL

SEQ ID NO: 1064 - protein, 736 aa, Artificial Sequence
  source: /note="Description of Artificial Sequence: Synthetic polypeptide"
MAADGYLPDWLEDNLSEGIREWWALKPGAPKPKANQQKQDDGRGLVLPGYKYLGPFNGLDKGEPVNAADAAALEHDKAYDQQLKAGDNPYLRYNHADAEFQERLQEDTSFGGNLGRAVFQAKKRVLEPFGLVEEGAKTAPGKKRPVEQSPQEPDSSSGIGKTGQQPAKKRLNFGQTGDSESVPDPQPLGEPPATPAAVGPTTMASGGGAPMADNNEGADGVGNASGNWHCDSTWLGDRVITTSTRTWALPTYNNHLYKQISSASTGASNDNHYFGYSTPWGYFDFNRFHCHFSPRDWQRLINNNWGFRPKRLNFKLFNIQVKEVTDNNGVKTIANNLTSTVQVFTDSEYQLPYVLGSAHQGCLPPFPADVFMIPQYGYLTLNNGSQAVGRSSFYCLEYFPSQMLRTGNNFTFSYTFEDVPFHSSYAHSQSLDRLMNPLIDQYLYYLSRTQTTGGTGNTQTLGFSQGGPNTMANQAKNWLPGPCYRQQRVSTTTGQNNNSNFAWTAGTKYHLNGRNSLANPGIAMATHKDDKERFFPSNGILIFGKQNAARDNADYSDVMLTSEEEIKTTNPVATEEYGIVADNLQQQNTAPQIGTVNSQGALPGMVWQNRDVYLQGPIWAKIPHTDGNFHPSPLMGGFGLKHPPPQILIKNTPVPADPPTTFNQSKLNSFITQYSTGQVSVEIEWELQKENSKRWNPEIQYTSNYYKSTSVDFAVNTEGVYSEPHPIGTRYLTRPL

SEQ ID NO: 1065 - protein, 736 aa, Artificial Sequence
  source: /note="Description of Artificial Sequence: Synthetic polypeptide"
MAADGYLPDWLEDNLSEGIREWWDLKPGAPKPKANQQKQDDGRGLVLPGYKYLGPFNGLDKGEPVNAADAAALEHDKAYDQQLKAGDNPYLRYNHADAEFQERLQEDTSFGGNLGRAVFQAKKRVLEPLGLVEEGAKTAPGKKRPVEQSPQEPDSSSGIGKTGQQPAKKRLNFGQTGDSESVPDPQPLGEPPATPAAVGPTTMASGGGAPMADNNEGADGVGSSSGNWHCDSTWLGDRVITTSTRTWALPTYNNHLYKQISSASTGASNDNHYFGYSTPWGYFDFNRFHCHFSPRDWQRLINNNWGFRPKRLNFKLFNIQVKEVTQNEGTKTIANNLTSTIQVFTDSEYQLPYVLGSAHQGCLPPFPADVFMIPQYGYLTLNNGSQAVGRSSFYCLEYFPSQMLRTGNNFTFSYTFEDVPFHSSYAHSQSLDRLMNPLIDQYLYYLSRTQTTGGTANTQTLGFSQGGPNTMANQAKNWLPGPCYRQQRVSTTTGQNNNSNFAWTAGTKYHLNGRNSLANPGIAMATHKDDKERFFPSNGILIFGKQNAARDNADYSDVMLTSEEEIKTTNPVATEEYGIVADNLQQQNTAPQIGTVNSQGALPGMVWQNRDVYLQGPIWAKIPHTDGNFHPSPLMGGFGLKHPPPQILIKNTPVPADPPTTFNQSKLNSFITQYSTGQVSVEIEWELQKENSKRWNPEIQYTSNYYKSTSVDFAVNTEGVYSEPHPIGTRYLTRPL

SEQ ID NO: 1066 - protein, 736 aa, Artificial Sequence
  source: /note="Description of Artificial Sequence: Synthetic polypeptide"
MAADGYLPDWLEDNLSEGIREWWALKPGAPKPKANQQKQDDGRGLVLPGYKYLGPFNGLDKGEPVNAADAAALEHDKAYDQQLKAGDNPYLRYNHADAEFQERLQEDTSFGGNLGRAVFQAKKRVLEPLGLVEEGAKTAPGKKRPVEQSPQEPDSSSGIGKTGQQPAKKRLNFGQTGDSESVPDPQPLGEPPATPAAVGPTTMAAGGGAPMADNNEGADGVGSSSGNWHCDSTWMGDRVITTSTRTWALPTYNNHLYKQISSASTGASNDNHYFGYSTPWGYFDFNRFHCHFSPRDWQRLINNNWGFRPKRLSFKLFNIQVKEVTQNEGTKTIANNLTSTIQVFTDSEYQLPYVLGSAHQGCLPPFPADVFMIPQYGYLTLNNGSQAVGRSSFYCLEYFPSQMLRTGNNFTFSYTFEDVPFHSSYAHSQSLDRLMNPLIDQYLYYLSRTQTTGGTANTQTLGFSQGGPNTMANQAKNWLQGPCYRQQRVSTTTGQNNNSNFAWTAGTKYHLNGRNSLANPGIAMATHKDDKERFFPSNGILIFGKQNAARDNADYSDVMLTSEEEIKTTNPVATEEYGIVADNLQQQNTAPQIGTVNSQGALPGMVWQNLDVYLQGPIWAKIPHTDGNFHPSPLMGGFGLKHPPPQILIKNTPVPADPPTTFNQSKLNSFITQYSTGQVSVEIEWELQKENSKRWNPEIQYTSNYYKSTSVDFAVNTEGVYSEPHPIGTRYLTRPL

SEQ ID NO: 1067 - protein, 737 aa, Artificial Sequence
  source: /note="Description of Artificial Sequence: Synthetic polypeptide"
MAADGYLPDWLEDNLSEGIREWWALKPGAPKPKANQQKQDDGRGLVLPGYKYLGPFNGLDKGEPVNAADAAALEHDKAYDQQLKAGDNPYLRYNHADAEFQERLQEDTSFGGNLGRAVFQAKKRVLEPLGLVEEGAKTAPGKKRPVEPSPQRSPDSSSGIGKTGQQPAKKRLNFGQTGDSESVPDPQPLGEPPATPAAVGPTTMASGGGAPMADNNEGADGVGNASGNWHCDSQWLGDRVITTSTRTWALPTYNNHLYKQISSASTGASNDNHYFGYSTPWGYFDFNRFHCHFSPRDWQRLINNNWGFRPKRLNFKLFNIQVKEVTDNNGVKTIANNLTSTVQVFTDSDYQLPYVLGSAHEGCLPPFPADVFMIPQYGYLTLNNGSQAVGRSSFYCLEYFPSQMLRTGNNFQFTYTFEDVPFHSSYAHSQSLDRLMNPLIDQYLYYLSRTQTTGGTANTQTLGFSQGGPNTMANQAKNWVPGPCYRQQRVSTATGQNNNSNFAWTAGTKYHLKGRNSLANPGIAMATHKDDKERFFPSNGILIFGKQNAARDNADYSDVMLTSEEEIKTTNPVATEEYGIVADNLQQQNTAPQIGTVNSQGALPGMVWQNRDVYLQGPIWAKIPHTDGNFHPSPLMGGFGLKHPPPQILIKNTPVPADPPTTFNQSKLNSFITQYSTGQVSVEIEWELQKENSKRWNPEIQYTSNYYKSTSVDFAVNTEGVYSEPHPIGTRYLTRPL

SEQ ID NO: 1068 - protein, 737 aa, Artificial Sequence
  source: /note="Description of Artificial Sequence: Synthetic polypeptide"
  MOD_RES (226)..(226): Any naturally occurring amino acid
  MOD_RES (233)..(233): Any naturally occurring amino acid
  MOD_RES (239)..(239): Any naturally occurring amino acid
  MOD_RES (250)..(250): Any naturally occurring amino acid
  MOD_RES (253)..(253): Any naturally occurring amino acid
  MOD_RES (255)..(255): Any naturally occurring amino acid
MAADGYLPDWLEDTLSEGIRQWWKLKPGPPPPKPAERHKDDSRGLVLPGYKYLGPFNGLDKGEPVNEADAAALEHDKAYDRQLDSGDNPYLKYNHADAEFQERLKEDTSFGGNLGRAVFQAKKRVLEPLGLVEEGAKTAPGKKRPVEQSPQEPDSSSGIGKTGQQPAKKRLNFGQTGDSESVPDPQPLGEPPATPSGVGPNTMAAGGGAPMADNNEGADGVGSSSXNWHCDSXWLGDRXITTSTRTWALXTYXNXLYKQISNSTSGGATNDNTYFGYSTPWGYFDFNRFHCHFSPRDWQRLINNNWGFRPKRLNFKLFNIQVKEVTQNEGTKTIANNLTSTIQVFTDSEYQLPYVLGSAHQGCLPPFPADVFMIPQYGYLTLNNGSQAVGRSSFYCLEYFPSQMLRTGNNFQFTYTFEDVPFHSSYAHSQSLDRLMNPLIDQYLYYLSRTQTTGGTANTQTLGFSQGGPNTMANQAKNWLPGPCYRQQRVSTTTGQNNNSNFAWTAGTKYHLNGRNSLANPGIAMATHKDDKERFFPSNGILIFGKQNAARDNADYSDVMLTSEEEIKTTNPVATEEYGIVADNLQQQNTAPQIGTVNSQGALPGMVWQNRDVYLQGPIWAKIPHTDGNFHPSPLMGGFGLKHPPPQILIKNTPVPADPPTTFSQAKLASFITQYSTGQVSVEIEWELQKENSKRWNPEVQYTSNYAKSANVDFTVDNNGLYTEPRPIGTRYLTRPL

SEQ ID NO: 1069 - protein, 737 aa, Artificial Sequence
  source: /note="Description of Artificial Sequence: Synthetic polypeptide"
MAADGYLPDWLEDNLSEGIREWWDLKPGAPKPKANQQKQDDGRGLVLPGYKYLGPFNGLDKGEPVNAADAAALEHDKAYDQQLKAGDNPYLRYNHADAEFQERLQEDTSFGGNLGRAVFQAKKRVLEPLGLVEEGAKTAPGKKRPVEPSPQRSPDSSTGIGKKGQQPAKKRLNFGQTGDSESVPDPQPIGEPPAGPSGVGSLTMASGGGAPVADNNEGADGVGSSSGNWHCDSQWLGDRVITTSTRTWALPTYNNHLYKQISSASTGASNDNHYFGYSTPWGYFDFNRFHCHFSPRDWQRLINNNWGFRPKRLNFKLFNIQVKEVTDNDGVKTIANNLTSTIQVFTDSEYQLPYVLGSAHQGCLPPFPADVFMIPQYGYLTLNNGSQAVGRSSFYCLEYFPSQMLRTGNNFTFSYTFEDVPFHSSYAHSQSLDRLMNPLIDQYLYYLSRTQTTGGTANTQTLGFSQGGPNTMANHAKNWLPGPCYRQQRVSTTTGQNNNSNFAWTAGTKYHLNGRNSLANPGIAMATHKDDKERFFPSNGILIFGKQNAARDNADYSDVMLTSEEEIKTTNPVATEEYGIVADNLQQQNTAPQIGTVNSQGALPGMVWQNRDVYLQGPIWAKIPHTDGNFHPSPLMGGFGLKHPPPQILIKNTPVPADPPTTFNQSKLNSFITQYSTGQVSVEIEWELQKENSKRWNPEIQYTSNYYKSTSVDFAVNTEGVYSEPHPIGTRYLTRPL

SEQ ID NO: 1070 - protein, 736 aa, Artificial Sequence
  source: /note="Description of Artificial Sequence: Synthetic polypeptide"
MAADGYLPDWLEDTLSEGIRQWWKLKPGPPPPKPAERHKDDSRGLVLPGYKYLGPFNGLDKGEPVNEADAAALEHDKAYDRQLDSGDNPYLKYNHADAEFQERLKEDTSFGGNLGRAVFQAKKRVLEPLGLVEEPVKTAPGKKRPVEHSPVEPDSSSGTGKAGQQPAKKRLNFGQTGDSESVPDPQPLGEPPATPAAVGPTTMASGGGAPMADNNEGADGVGNASGNWHCDSTWLGDRVITTSTRTWALPTYNNHLYKQISSASTGASNDNHYFGYSTPWGYFDFNRFHCHFSPRDWQRLINNNWGFRPKRLNFKLFNIQVKEVTQNEGTKTIANNLTSTIQVFTDSEYQLPYVLGSAHQGCLPPFPADVFMIPQYGYLTLNNGSQAVGRSSFYCLEYFPSQMLRTGNNFQFTYTFEDVPFHSSYAHSQSLDRLMNPLIDQYLYYLSRTQTTGGTANTQTLGFSQGGPNTMANQAKNWLPGPCYRQQRVSTTTGQNNNSNFAWTAGTKYHLNGRNSLANPGIAMATHKDDKERFFPSNGILIFGKQNAARDNADYSDVMLTSEEEIKTTNPVATEEYGIVADNLQQQNTAPQIGTVNSQGALPGMVWQNRDVYLQGPIWAKIPHTDGNFHPSPLMGGFGLKHPPPQILIKNTPVPADPPTTFNQSKLNSFITQYSTGQVSVEIEWELQKENSKRWNPEIQYTSNYYKSTSVDFAVNTEGVYSEPHPIGTRYLTRPL

SEQ ID NO: 1071 - protein, 736 aa, Artificial Sequence
  source: /note="Description of Artificial Sequence: Synthetic polypeptide"
MAADGYLPDWLEDNLSEGIREWWALKPGAPKPKANQQKQDDGRGLVLPGYKYLGPFNGLDKGEPVNAADAAALEHDKAYDQQLQAGDNPYLRYNHADAEFQERLQGDTSFGGNLGRAVFQAKKRVLEPLGLVEEGAKTAPGKKRPVEQSPQEPDSSSGIGKTGQQPAKKRLNFGQTGDSESVPDPQPLGEPPATPAAVGPTTMASGGGAPMADNNEGADGVGNASGNWHCDSTWLGDRVITTSTRTWALPTYNNHLYKQISSASTGASNDNHYFGYSTPWGYFDFNRFHCHFSPRDWQRLINNNWGFRPKRLNFKLFNIQVKEVTDNNGVKTIANNLTSTIQVFTDSEYQLPYVLGSAHQGCLPPFPADVFMIPQYGYLTLNNGSQAVGRSSFYCLEYFPSQMLRTGNNFQFTYTFEDVPFHSSYAHSQSLDRLMNPLIDQYLYYLSRTQTTGGTANTQTLGFSQGGPNTMANQAKNWLPGPCYRQQRVSTTTGQNNNSNFAWTAGTKYHLNGRNSLANPGIAMATHKDDKERFFPSNGILIFGKQNAARDNADYSDVMLTSEEEIKTTNPVATEEYGIVADNLQQQNTAPQIGTVNSQGALPGMVWQNRDVYLQGPIWAKIPHTDGNFHPSPLMGGFGLKHPPPQILIKNTPVPADPPTTFNQSKLNSFITQYSTGQVSVEIEWELQKENSKRWNPEIQYTSNYYKSTSVDFAVNTEGVYSEPHPIGTRYLTRPL

SEQ ID NO: 1072 - protein, 738 aa, Artificial Sequence
  source: /note="Description of Artificial Sequence: Synthetic polypeptide"
MAADGYLPDWLEDTLSEGIRQWWKLKPGPPPPKPAERHKDDSRGLVLPGYKYLGPFNGLDKGEPVNAADAAALEHDKAYDQQLKAGDNPYLRYNHADAEFQERLKEDTSFGGNLGRAVFQAKKRVLEPLGLVEEGAKTAPGKKRPVEPSPQRSPDSSTGIGKKGQQPARKRLNFGQTGDSESVPDPQPLGEPPAAPSGVGPNTMAAGGGAPMADNNEGADGVGSSSGNWHCDSQWLGDRVITTSTRTWALPTYNNHLYKQISNSTSGGSSNDNAYFGYSTPWGYFDFNRFHCHFSPRDWQRLINNNWGFRPKRLNFKLFNIQVKEVTDNNGVKTIANNLTSTVQVFTDSEYQLPYVLGSAHQGCLPPFPADVFMIPQYGYLTLNNGSQAVGRSSFYCLEYFPSQMLRTGNNFTFSYTFEDVPFHSSYAHSQSLDRLMNPLIDQYLYYLSRTQTTGGTANTQTLGFSQGGPNTMANQAKNWLPGPCYRQQRVSTTTGQNNNSNFAWTAGTKYHLNGRNSLANPGIAMATHKDDKERFFPSNGILIFGKQNAARDNADYSDVMLTSEEEIKTTNPVATEEYGIVADNLQQQNTAPQIGTVNSQGALPGMVWQNRDVYLQGPIWAKIPHTDGHFHPSPLMGGFGLKHPPPQILIKNTPVPANPPTTFNQSKLNSFITQYSTGQVSVEIEWELQKENSKRWNPEVQYTSNYAKSANVDFTVDNNGLYTEPRPIGTRYLTRPL

SEQ ID NO: 1073 - protein, 738 aa, Artificial Sequence; identical to SEQ ID NO: 1072
  source: /note="Description of Artificial Sequence: Synthetic polypeptide"

SEQ ID NO: 1074 - protein, 736 aa, Artificial Sequence
  source: /note="Description of Artificial Sequence: Synthetic polypeptide"
MAADGYLPDWLEDNLSEGIREWWALKPGAPKPKANQQKQDDGRGLVLPGYKYLGPFNGLDKGEPVNAADAAALEHDKAYDQQLKAGDNPYLRYNHADAEFQERLQEDTSFGGNLGRAVFQAKKRLLEPLGLVEEGAKTAPGKKRPVEQSPQEPDSSSGIGKTGQQPAKKRLNFGQTGDSESVPDPQPLGEPPATPAAVGPTTMASGGGAPMADNNEGADGVGNSSGNWHCDSTWMGDRVITTSTRTWALPTYNNHLYKQISSASTGASNDNHYFGYSTPWGYFDFNRFHCHFSPRDWQRLINNNWGFRPKRLNFKLFNIQVKEVTQNEGTKTIANNLTSTIQVFTDSEYQLPYVLGSAHQGCLPPFPADVFIIPQYGYLTLNNGSQAVGRSSFYCLEYFPSQMLRTGNNFTFSYTFEDVPFHSSYAHSQSLDRLMNPLIDQYLYYLSRTQTTGGTANTQTLGFSQGGPNTMANQAKNWLPGPCYRQQRVSTTTGQNNNSNFAWTAGTKYHLNGRNSLANPGIAMATHKDDKERFFPSNGILIFGKQNAARDNADYSDVMLTSEEEIKTTNPVATEEYGIVADNLQQQNTAPQIGTVNSQGALPGMVWQNRDVYLQGPIWAKIPHTDGNFHPSPLMGGFGLKHPPPQILIKNTPVPADPPTTFNQSKLNSFITQYSTGQVSVEIEWELQKENSKRWNPEIQYTSNYYKSTSVDFAVNTEGVYSEPHPIGTRYLTRPL

SEQ ID NO: 1075 - protein, 736 aa, Artificial Sequence
  source: /note="Description of Artificial Sequence: Synthetic polypeptide"
MAADGYLPDWLEDNLSEGIREWWALKPGAPKPKANQQKQDDGRGLVLPGYKYLGPFNGLDKGEPVNAADAAALEHDKAYDQQLKAGDNPYLRYNHADAEFQERLQEDTSFGGNLGRAVFQAKKRVLEPFGLVEEAAKTAPGKKRPVEQSPQEPDSSSGIGKTGQQPAKKRLNFGQTGDSESVPDPQPLGEPPATPAAVGPTTMASGGGAPMADNNEGADGVGNASGNWHCDSTWLGDRVITTSTRTWALPTYNNHLYKQISSASTGASNDNHYFGYSTPWGYFDFNRFHCHFSPRDWQRLINNNWGFRPKRLNFKLFNIQVKEVTQNEGTKTIANNLTSTIQVFTDSEYQLPYVLGSAHQGCLPPFPADVFMIPQYGYLTLNNGSQAVGRSSFYCLEYFPSQMLRTGNNFTFSYTFEDVPFHSSYAHSQSLDRLMNPLIDQYLYYLSRTQTTGGTANTQTLGFSQGGPNTMANHAKNWLPGPCYRQQRVSTTTGQNNNSNFAWTAGTKYHLNGRNSLANPGIAMATHKDDKERFFPSNGILIFGKQNAARDNADYSDVMLTSEEEIKTTNPVATEEYGIVADNLQQQNTAPQIGTVNSQGALPGMVWQNRDVYLQGPIWAKIPHTDGNFHPSPLMGGFGLKHPPPQILIKNTPVPADPPTTFNQSKLNSFITQYSTGQVSVEIEWELQKENSKRWNPEIQYTSNYYKSTSVDFAVNTEGVYSEPHPIGTRYLTRPL

SEQ ID NO: 1076 - protein, 736 aa, Artificial Sequence
  source: /note="Description of Artificial Sequence: Synthetic polypeptide"
MAADGYLPDWLEDNLSEGIREWWALKPGAPKPKANQQKQDDGRGLVLPGYKYLGPFNGLDKGEPVNEADAAALEHDKAYDQQLKAGDNPYLRYNHADAEFQERLQEDTSFGGNLGRAVFQAKKRLLEPLGLVEEAAKTAPGKKRPVEQSPQEPDSSAGIGKSGAQPAKKRLNFGQTGDSESVPDPQPLGEPPATPAAVGPTTMASGGGAPMADNNEGADGVGNASGNWHCDSTWLGDRVITTSTRTWALPTYNNHLYKQISSASTGASNDNHYFGYSTPWGYFDFNRFHCHFSPRDWQRLINNNWGFRPKRLNFKLFNIQVKEVTDNDGVKTIANNLTSTIQVFTDSEYQLPYVLGSAHQGCLPPFPADVFMIPQYGYLTLNNGSQAVGRSSFYCLEYFPSQMLRTGNNFQFTYTFEDVPFHSSYAHSQSLDRLMNPLIDQYLYYLSRTQTTGGTANTQTLGFSQGGPNTMANQAKNWLPGPCYRQQRVSTTTGQNNNSNFAWTAGTKYHLNGRNSLANPGIAMATHKDDKERFFPSNGILIFGKQNAARDNADYSDVMLTSEEEIKTTNPVATEEYGIVADNLQQQNTAPQIGTVNSQGALPGMVWQNRDVYLQGPIWAKIPHTDGNFHPSPLMGGFGLKHPPPQILIKNTPVPADPPTTFNQSKLNSFITQYSTGQVSVEIEWELQKENSKRWNPEIQYTSNYYKSTSVDFAVNTEGVYSEPHPIGTRYLTRPL

SEQ ID NO: 1077 - protein, 736 aa, Artificial Sequence
  source: /note="Description of Artificial Sequence: Synthetic polypeptide"
MAADGYLPDWLEDNLSEGIREWWALKPGAPKPKANQQKQDDGRGLVLPGYKYLGPFNGLDKGEPVNAADAAALEHDKAYDQQLKAGDNPYLRYNHADAEFQERLQEDTSFGGNLGRAVFQAKKRVLEPLGLVEEGAKTAPGKKRPVEQSPQEPDSSAGIGKTGAQPAKKRLNFGQTGDSESVPDPQPLGEPPATPAAVGPTTMASGGGAPMADNNEGADGVGSASGNWHCDSTWLGDRVITTSTRTWALPTYNNHLYKQISSASTGASNDNHYFGYSTPWGYFDFNRFHCHFSPRDWQRLINNNWGFRPKRLNFKLFNIQVKEVTDNNGVKTIANNLTSTIQVFTDSEYQLPYVLGSAHQGCLPPFPADVFMIPQYGYLTLNNGSQAVGRSSFYCLEYFPSQMLRTGNNFTFSYTFEDVPFHSSYAHSQSLDRLMNPLIDQYLYYLSRTQTTGGTANTQTLGFSQGGPNTMANQAKNWLPGPCYRQQRVSTTTGQNNNSNFAWTAGTKYHLNGRNSLANPGIAMATHKDDKERFFPSNGILIFGKQNAARDNADYSDVMLTSEEEIKTTNPVATEEYGIVADNLQQQNTAPQIGTVNSQGALPGMVWQNRDVYLQGPIWAKIPHTDGNFHPSPLMGGFGLKHPPPQILIKNTPVPADPPTTFNQSKLNSFITQYSTGQVSVEIEWELQKENSKRWNPEIQYTSNYYKSTSVDFAVNTEGVYSEPHPIGTRYLTRPL

SEQ ID NO: 1078 - protein, 736 aa, Artificial Sequence
  source: /note="Description of Artificial Sequence: Synthetic polypeptide"
MAADGYLPDWLEDNLSEGIREWWDLKPGAPKPKANQQKQDDGRGLVLPGYKYLGPFNGLDKGEPVNAADAAALEHDKAYDQQLKAGDNPYLRYNHADAEFQERLQEDTSFGGNLGRAVFQAKKRLLEPLGLVEEAAKTAPGKKRPVEQSPQEPDSSAGIGKSGAQPAKKRLNFGQTGDTESVPDPQPIGEPPAAPSGVGPNTMAAGGGAPMADNNEGADGVGSSSGNWHCDSQWLGDRVITTSTRTWALPTYNNHLYKQISSASTGASNDNHYFGYSTPWGYFDFNRFHCHFSPRDWQRLINNNWGFRPKRLNFKLFNIQVKEVTQNEGTKTIANNLTSTIQVFTDSEYQLPYVLGSAHQGCLPPFPADVFMIPQYGYLTLNNGSQAVGRSSFYCLEYFPSQMLRTGNNFQFTYTFEDVPFHSSYAHSQSLDRLMNPLIDQYLYYLSRTQTTGGTANTQTLGFSQGGPNTMANHAKNWLPGPCYRQQRVSTTTGQNNNSNFAWTAGTKYHLNGRNSLANPGIAMATHKDDKERFFPSNGILIFGKQNAARDNADYSDVMLTSEEEIKTTNPVATEEYGIVADNLQQQNTAPQIGTVNSQGALPGMVWQNRDVYLQGPIWAKIPHTDGNFHPSPLMGGFGLKHPPPQILIKNTPVPADPPTTFNQSKLNSFITQYSTGQVSVEIEWELQKENSKRWNPEIQYTSNYYKSTSVDFAVNTEGVYSEPHPIGTRYLTRPL

SEQ ID NO: 1079 - protein, 737 aa, Artificial Sequence; identical to SEQ ID NO: 1061
  source: /note="Description of Artificial Sequence: Synthetic polypeptide"

SEQ ID NO: 1080 - protein, 737 aa, Artificial Sequence
  source: /note="Description of Artificial Sequence: Synthetic polypeptide"
MAADGYLPDWLEDNLSEGIREWWALKPGAPKPKANQQKQDDGRGLVLPGYKYLGPFNGLDKGEPVNAADAAALEHDKAYDQQLKAGDNPYLRYNHADAEFQERLKEDTSFGGNLGRAVFQAKKRVLEPFGLVEEGAKTAPGKKRPVEQSPQEPDSSSGIGKTGQQPAKKRLNFGQTGDSESVPDPQPLGEPPAAPSGVGPNTMAAGGGAPMADNNEGADGVGSSSGNWHCDSQWLGNRVITTSTRTWALPTYNNHLYKQISNSTSGGSSNDNAYFGYSTPWGYFDFNRFHCHFSPRDWQRLINNNWGFRPKRLNFKLFNIQVKEVTDNNGVKTIANNLTSTVQVFTDSEYQLPYVLGSAHQGCLPPFPADVFMIPQYGYLTLNNGSQAVGRSSFYCLEYFPSQMLRTGNNFQFTYTFEDVPFHSSYAHSQSLDRLMNPLIDQYLYYLSRTQTTGGTANTQTLGFSQGGPNTMANQAKNWLPGPCYRQQRVSTTTGQNNNSNFAWTAGTKYHLNGRNSLANPGIAMATHKDDKERFFPSNGILIFGKQNAARDNADYSDVMLTSEEEIKTTNPVATEEYGIVADNLQQQNTAPQIGTVNSQGALPGMVWQNRDVYLQGPIWAKIPHTDGNFHPSPLMGGFGLKHPPPQILIKNTPVPADPPTTFNQSKLNSFITQYSTGQVSVEIEWELQKENSKRWNPEIQYTSNYYKSTSVDFAVNTEGVYSEPHPIGTRYLTRPL

SEQ ID NO: 1081 - protein, 736 aa, Artificial Sequence
  source: /note="Description of Artificial Sequence: Synthetic polypeptide"
MAADGYLPDWLEDNLSEGIREWWDLKPGAPKPKANQQKQDDGRGLVLPGYKYLGPFNGLDRGEPVNAADAAALEHDKAYDQQLKAGDNPYLRYNHADAEFQERLQEDTSFGGNLGRAVFQAKKRVLEPLGLVEEGAKTAPGKKRPVEQSPQEPDSSSGIGKTGQQPAKKRLNFGQTGDSESVPDPQPLGEPPATPAAVGPTTMASGGGAPMADNNEGADGVGNASGNWHCDSTWLGDRVITTSTRTWALPTYNNHLYKQISSASTGASNDNHYFGYSTPWGYFDFNRFHCHFSPRDWQRLINNNWGFRPKRLNFKLFNIQVKEVTDNNGVKTIANNLTSTIQVFTDSEYQLPYVLGSAHQGCLPPFPADVFMIPQYGYLTLNNGSQAVGRSSFYCLEYFPSQMLRTGNNFQFTYTFEDVPFHSSYAHSQSLDRLMNPLIDQYLYYLSRTQTTGGTANTQTLGFSQGGPNTMANQAKNWLPGPCYRQQRVSTTTGQNNNSNFAWTAGTKYHLNGRNSLANPGIAMATHKDDKERFFPSNGILIFGKQNAARDNADYSDVMLTSEEEIKTTNPVATEEYGIVADNLQQQNTAPQIGTVNSQGALPGMVWQNRDVYLQGPIWAKIPHTDGNFHPSPLMGGFGLKHPPPQILIKNTPVPADPPTTFNQSKLNSFITQYSTGQVSVEIEWELQKENSKRWNPEIQYTSNYYKSTSVDFAVNTEGVYSEPHPIGTRYLTRPL

SEQ ID NO: 1082 - protein, 736 aa, Artificial Sequence
  source: /note="Description of Artificial Sequence: Synthetic polypeptide"
MAADGYLPDWLEDNLSEGIREWWDLKPGAPKPKANQQKQDDGRGLVLPGYKYLGPFNGLDKGEPVNAADAAALEHDKAYDQQLKAGDNPYLRYNHADAEFQERLQEDTSFGGNLGRAVFQAKKRVLEPLGLVEEGAKTAPGKKRPVEQSPQEPDSSSGIGKKGQQPARKRLNFGQTGDSESVPDPQPLGEPPAAPSGVGSLTMASGGGAPMADNNEGADGVGNASGNWHCDSTWLGDRVITTSTRTWALPTYNNHLYKQISSASTGASNDNHYFGYSTPWGYFDFNRFHCHFSPRDWQRLINNNWGFRPKRLNFKLFNIQVKEVTQNEGTKTIANNLTSTVQVFTDSDYQLPYVLGSAHQGCLPPFPADVFMIPQYGYLTLNNGSQAVGRSSFYCLEYFPSQMLRTGNNFQFTYTFEDVPFHSSYAHSQSLDRLMNPLIDQYLYYLSRTQTTGGTANTQTLGFSQGGPNTMANQAKNWLPGPCYRQQRVSTTTGQNNNSNFAWTAGTKYHLNGRNSLSNPGIAMATHKDDKERFFPSNGILIFGKQNAARDNADYSDVMLTSEEEIKTTNPVATEEYGIVADNLQQQNTAPQIGTVNSQGALPGMVWQNRDMYLQGPIWAKIPHTDGNFHPSPLMGGFGLKHPPPQILIKNTPVPADPPTTFNQSKLNSFITQYSTGQVSVEIEWELQKENSKRWNPEIQYTSNYYKSTSVDFAVNTEGVYSEPHPIGTRYLTRPL

SEQ ID NO: 1083 - protein, 736 aa, Artificial Sequence
  source: /note="Description of Artificial Sequence: Synthetic polypeptide"
MAADGYLPDWLEDNLSEGIREWWALKPGAPKPKANQQKQDDGRGLVLPGYKYLGPFNGLDKGEPVNAADAAALEHDKAYDQQLKAGDNPYLRYNHADAEFQERLQEDTSFGGNLGRAVFQAKKRVLEPFGLVEEGAKTAPGKKRPVEQSPQEPDSSSGIGKTGQQPAKKRLNFGQTGGSESVPDPQPLGEPPATPAAVGPTTMAAGGGAPMADNNEGADGVGSSSGNWHCDSTWLGDRVITTSTRTWALPTYNNHLYKQISSASTGASNDNHYFGYSTPWGYFDFNRFHCHFSPRDWQRLINNNWGFRPKRLNFKLFNIQVKEVTDNNGVKTIANNLTSTVQVFTDSEYQLPYVLGSAHQGCLPPFPADVFMIPQYGYLTLNNGSQAVGRSSFYCLEYFPSQMLRTGNNFTFSYTFEEVPFHSSYAHSQSLDRLMNPLIDQYLYYLSRTQTTGGTANTQTLGFSQGGPNTMANQAKNWLPGPCYRQQRVSTTTGQNNNSNFAWTAGTKYHLNGRNSLANPGIAMASHKDDKERFFPSNGILIFGKQNAARDNADYSDVMLTSEEEIKTTNPVATEEYGIVADNLQQQNTAPQIGTVNSQGALPGMVWQNRDVYLQGPIWAKIPHTDGNFHPSPLMGGFGLKHPPPQILIKNTPVPADPPTTFNQSKLNSFITQYSTGQVSVEIEWELQKENSKRWNPEIQYTSNYYKSTSVDFAVNTEGVYSEPHPIGTRYLTRPL

SEQ ID NO: 1084 - DNA, 2211 bp, Artificial Sequence
  source: /note="Description of Artificial Sequence: Synthetic polynucleotide"
atggctgccgatggttatcttccagattggctcgaggacaacctctctgagggcattcgcgagtggtgggacttgaaacctgcatccccgaaacccaaagccaaccagcaaaagcaggacgacggccggggtctggtgcttcctggctacaagtacctcggacccttcaacggactcgacaagggggagcccgtcaacgcggcggacgcagcggccctcgagcacgacaaggcctacgaccagcagctcaaagcgggtgacaatccgtacctgcggtataaccacgccgacgccgagtttcaggagcgtctgcaagaagatacgtcttttgggggcaacctcgggcgagcagtcttccaggccaaaaagaggcttcttgaacctcttggtctggttgaggaagcggctaagacggctcctggaaagaagaggcctgtagagcagtctcctcaggaaccggactcctccgcgggtattggcaaatcgggtgcacagcccgccaaaaagagactcaatttcggtcagactggcggcacagagtcagttccagaccctcaacctctcggagaacctccagcagcgccctctggtgtgggacctaatacaatggctgcaggcggtggcgcaccaatggcagacaataacgaaggcgccgacggagtgggtagttcctcgggaaattggcattgcgattccacatggctgggcgacagagtcatcaccaccagcaccagaacctgggccctgcccacttacaacaaccatctctacaagcaaatctccagtgcttcaacgggggccagcaacgacaaccactacttcggctacagcaccccctgggggtattttgatttcaacagattccactgccacttctcaccacgtgactggcagcgactcatcaacaacaactggggattccggcccaagagactcagcttcaagctcttcaacatccaggtcaaggaggtcacgcagaatgaaggcaccaagaccatcgccaataacctcaccagcaccatccaggtgtttacggactcggagtaccagctgccgtacgttctcggctctgcccaccagggctgcctgcctccgttcccggcggacgtgttcatgattccccagtacggatacctaacactcaacaacggtagtcaggccgtgggacgctcctccttctactgcctggaatactttccttcgcagatgctgagaaccggcaacaacttccagtttacttacaccttcgaggacgtgcctttccacagcagctacgcccacagccagagcttggaccggctgatgaatcctctgattgaccagtacctgtactacttgtctcggactcaaacaacaggaggcacggcaaatacgcagactctgggcttcagccaaggtgggcctaatacaatggccaatcaggcaaagaactggctgccaggaccctgttaccgccaacaacgcgtctcaacgacaaccgggcaaaacaacaatagcaactttgcctggactgctgggaccaaataccatctgaatggaagaaattcattggctaatcctggcatcgctatggcaacacacaaagacgacaaggagcgtttttttcccagtaacgggatcctgatttttggcaaacaaaatgctgccagagacaatgcggattacagcgatgtcatgctcaccagcgaggaagaaatcaaaaccactaaccctgtggctacagaggaatacggtatcgtggcagataacttgcagcagcaaaacacggctcctcaaattggaactgtcaacagccagggggccttacccggtatggtctggcagaaccgggacgtgtacctgcagggtcccatctgggccaagattcctcacacggacggcaacttccacccgtctccgctgatgggcggctttggcctgaaacatcctccgcctcagatcctgatcaagaacacgcctgtacctgcggatcctccgaccaccttcaaccagtcaaagctgaactctttcatcacgcaatacagcaccggacaggtcagcgtggaaattgaatgggagctgcagaaggaaaacagcaagcgctggaaccccgagatccagtacacctccaactactacaaatctacaagtgtggactttgctgttaatacagaaggcgtgtactctgaaccccaccccattggcacccgttacctcacccgtcccctgtaa

SEQ ID NO: 1085 - DNA, 2211 bp, Artificial Sequence
  source: /note="Description of Artificial Sequence: Synthetic polynucleotide"
atggctgccgatggttatcttccagattggctcgaggacaacctctctgagggcattcgcgagtggtgggacttgaaacctggagccccgaaacccaaagccaaccagcaaaagcaggacgacggccggggtctggtgcttcctggctacaagtacctcggacccttcaacggactcgacaagggggagcccgtcaacgcggcggacgcagcggccctcgagcacgacaaggcctacgaccagcagctcaaagcgggtgacaatccgtacctgcggtataaccacgccgacgccgagtttcaggagcgtctgcaagaagatacgtcttttgggggcaacctcgggcgagcagtcttccaggccaagaagagggttctcgaaccttttggtctggttgaggaaggcgctaagacggctcctggaaagaaacgtccggtagagcagtcgccacaagagccagactcctcctcgggcattggcaagacaggccagcagcccgctaaaaagagactcaattttggtcagactggcgactcagagtcagtccccgacccacaacctctcggagaacctccagcaacccccgctgctgtgggacctactacaatggcttcaggtggtggcgcaccaatggcagacaataacgaaggcgccgacggagtgggtaatgcctcaggaaattggcattgcgattcccaatggctgggggacagagtcatcaccaccagcacccgaacctgggccctgcccacctacaacaatcacctctacaagcaaatctccagtgcttcaacgggggccagcaacgacaaccactacttcggctacagcaccccctgggggtattttgatttcaacagattccactgccatttctcaccacgtgactggcagcgactcatcaacaacaattggggattccggcccaagagactcaacttcaaactcttcaacatccaagtcaaggaggtcacgcagaatgaaggcaccaagaccatcgccaataacctcaccagcaccatccaggtgtttacggactcggagtaccagctgccgtacgttctcggctccgcccaccagggctgcctgcctccgttcccggcggacgtgttcatgattccccagtacggctacctaacactcaacaacggtagtcaggccgtgggacgctcctccttctactgcctggaatactttccttcgcagatgctgagaaccggcaacaacttccagtttacttacaccttcgaggacgtgcctttccacagcagctacgcccacagccagagcttggaccggctgatgaatcctctgattgaccagtacctgtactacttgtctcggactcaaacaacaggaggcacggcaaatacgcagactctgggcttcagccaaggtgggcctaatacaatggccaatcaggcaaagaactggctgccaggaccctgttaccgccaacaacgcgtctcaacgacaaccgggcaaaacaacaatagcaactttgcctggactgctgggaccaaataccatctgaatggaagaaattcattggctaatcctggcatcgctatggcaacacacaaagacgacaaggagcgtttttttcccagtaacgggatcctgatttttggcaaacaaaatgctgccagagacaatgcggattacagcgatgtcatgctcaccagcgaggaagaaatcaaaaccactaaccctgtggctacagaggaatacggtatcgtggcagataacttgcagcagcaaaacacggctcctcaaattggaactgtcaacagccagggggccttacccggtatggtctggcagaaccgggacgtgtacctgcagggtcccatctgggccaagattcctcacacggacggcaacttccacccgtctccgctgatgggcggctttggcctgaaacatcctccgcctcagatcctgatcaagaacacgcctgtacctgcggatcctccgaccaccttcaaccagtcaaagctgaactctttcatcacgcaatacagcaccggacaggtcagcgtggaaattgaatgggagctgcagaaggaaaacagcaagcgctggaaccccgagatccagtacacctccaactactacaaatctacaagtgtggactttgctgttaatacagaaggcgtgtactctgaaccccaccccattggcacccgttacctcacccgtcccctgtaa

SEQ ID NO: 1086 - DNA, 2211 bp, Artificial Sequence
  source: /note="Description of Artificial Sequence: Synthetic polynucleotide"
atggctgccgatggttatcttccagattggctcgaggacaacctctctgagggcattcgcgagtggtgggacttggaacctggagccccgaagcccaaagccaaccagcaaaagcaggacgacggccggggtctggtgcttcctggctacaagtacctcggacccttcaacggactcgacaagggggagcccgtcaacgcggcggacgcagcggccctcgagcacgacaaggcctacgaccagcagctcaaagcgggtgacaatccgtacctgcggtataaccacgccgacgccgagtttcaggagcgtctgcaagaagatacgtcttttgggggcaacctcgggcgagcagtcttccaggccaagaagcgggttctcgaacctctcggtctggttgaggaaggcgctaagacggctcctggaaagaaacgtccggtagagcagtcgccacaagagccagactcctcctcgggcatcggcaagacaggccagcagcccgctaaaaagagactcaattttggtcagactggcgactcagagtcagtccccgatccacaacctctcggagaacctccagcaacccccgctgctgtgggacctactacaatggcttcaggcggtggcgcaccaatggcagacaataacgaaggcgccgacggagtgggtaatgcctcaggaaattggcattgcgattccacatggctgggcgacagagtcatcaccaccagcacccgcacctgggccttgcccacctacaataaccacctctacaagcaaatctccagtgcttcaacaggggccagcaacgacaaccactacttcggctacagcaccccctgggggtattttgacttcaacagattccactgccacttctcaccacgtgactggcagcgactcatcaacaacaactggggattccggcctaagcgactcaacttcaagctcttcaacattcaggtcaaagaggttacggacaacaatggagtcaagaccatcgccaataaccttaccagcacggtccaggtcttcacggactcggagtaccagttgccgtacgtcctcggctctgcgcaccagggctgcctccctccgttcccggcggacgtgttcatgattccgcagtacggctacctaacgctcaacaacggtagtcaggccgtgggacgctcctccttctactgcctggaatactttccttcgcagatgctgagaaccggcaacaacttccagtttacttacaccttcgaggacgtgcctttccacagcagctacgcccacagccagagcttggaccggctgatgaatcctctgattgaccagtacctgtactacttgtctcggactcaaacaacaggaggcacggcaaatacgcagactctgggcttcagccaaggtgggcctaatacaatggccaatcaggcaaagaactggctgccaggaccctgttaccgccaacaacgcgtctcaacgacaaccgggcaaaacaacaatagcaactttgcctggactgctgggaccaaataccatctgaatggaagaaattcattggctaatcctggcatcgctatggcaacacacaaagacgacaaggagcgtttttttcccagtaacgggatcctgatttttggcaaacaaaatgctgccagagacaatgcggattacagcgatgtcatgctcaccagcgaggaagaaatcaaaaccactaaccctgtggctacagaggaatacggtatcgtggcagataacttgcagcagcaaaacacggctcctcaaattggaactgtcaacagccagggggccttacccggtatggtctggcagaaccgggacgtgtacctgcagggtcccatctgggccaagattcctcacacggacggcaacttccacccgtctccgctgatgggcggctttggcctgaaacatcctccgcctcagatcctgatcaagaacacgcctgtacctgcggatcctccgaccaccttcaaccagtcaaagctgaactctttcatcacgcaatacagcaccggacaggtcagcgtggaaattgaatgggagctgcagaaggaaaacagcaagcgctggaaccccgagatccagtacacctccaactactacaaatctacaagtgtggactttgctgttaatacagaaggcgtgtactctgaaccccaccccattggcacccgttacctcacccgtcccctgtaa

SEQ ID NO: 1087 - DNA, 2211 bp, Artificial Sequence
  source: /note="Description of Artificial Sequence: Synthetic polynucleotide"
atggctgccgatggttatcttccagattggctcgaggacactctctctgaaggaataagacagtggtggaagctcaaacctggcccaccaccaccaaagcccgcagagcggcataaggacgacagcaggggtcttgtgcttcctgggtacaagtacctcggacccttcaacggactcgacaagggagagccggtcaacgaggcagacgccgcggccctcgagcacgacaaagcctacgaccggcagctcgacagcggagacaacccgtacctcaagtacaaccacgccgacgcggagtttcaggagcgccttaaagaagatacgtcttttgggggcaacctcgggcgagcagtcttccaggccaagaagagggttctcgaaccttttggtctggttgaggaaggtgctaagacggctcctggaaagaaacgtccggtagagcagtcgccacaagagccagactcctcctcgggcattggcaagacaggccagcagcccgctaaaaagagactcaattttggtcagactggcgactcagagtcagtccccgacccacaacctctcggagaacctccagcaacccccgctgctgtgggacctactacaatggcttcaggcggtggcgcaccaatggcagacaataacgaaggcgccgacggagtgggtaatgcctcaggaaattggcattgcgattccacatggctgggcgacagagtcatcaccaccagcacccgaacatgggccttgcccacctataacaaccacctctacaagcaaatctccagtgcttcaacgggggccagcaacgacaaccactacttcggctacagcaccccctgggggtattttgacttcaacagattccactgccacttctcaccacgtgactggcagcgactcatcaacaacaactggggattccggcctaagcgactcaacttcaagctcttcaacattcaggtcaaagaggttacggacaacaatggagtcaagaccatcgccaataaccttaccagcacggtccaggtcttcacggactcagactatcagctcccgtacgtgctcgggtcggctcacgagggctgcctcccgccgttcccagcggacgttttcatgattcctcagtacggctacctaacactcaacaacggtagtcaggccgtgggacgctcctccttctactgcctggaatactttccttcgcagatgctgagaaccggcaacaacttccagtttacttacaccttcgaggacgtgcctttccacagcagctacgcgcacagccagagtctggaccggctgatgaatcctctgattgaccagtacctgtactacttgtctcggactcaaacaacaggaggcacggcaaatacgcagactctgggcttcagccaaggtgggcctaatacaatggccaatcaggcaaagaactggctgccaggaccctgttaccgccaacaacgcgtctcaacgacaaccgggcaaaacaacaatagcaactttgcctggactgctgggaccaaataccatctgaatggaagaaattcattggctaatcctggcatcgctatggcaacacacaaagacgacaaggagcgtttttttcccagtaacgggatcctgattttcggcaaacaaaatgctgccagagacaatgcggattacagcgatgtcatgctcaccagcgaggaagaaatcaaaaccactaaccctgtggctacagaggaatacggtatcgtggcagataacttgcagcagcaaaacacggctcctcaaattggaactgtcaacagccagggggccttacccggtatggtctggcagaaccgggacgtgtacctgcagggtcccatctgggccaagattcctcacacggacggcaacttccacccgtctccgctgatgggcggctttggcctgaaacatcctccgcctcagatcctgatcaagaacacgcctgtacctgcggatcctccgaccaccttcaaccagtcaaagctgaactctttcatcacgcaatacagcaccggacaggtcagcgtggaaattgaatgggagctgcagaaggaaaacagcaagcgctggaaccccgagatccagtacacctccaactactacaaatctacaagtgtggactttgctgttaatacagaaggcgtgtactctgaaccccaccccattggcaccagatacctgactcgtaatctgtaa

SEQ ID NO: 1088 - DNA, 2208 bp, Artificial Sequence
  source: /note="Description of Artificial Sequence: Synthetic polynucleotide"
atggctgccgatggttatcttccagattggctcgaggacactctctctgaaggaataagacagtggtggaagctcaaacctggcccaccaccaccaaagcccgcagagcggcataaggacgacagcaggggtcttgtgcttcctgggtacaagtacctcggacccttcaacggactcgacaagggagagccggtcaacgaggcagacgccgcggccctcgagcacgacaaagcctacgaccggcagctcgacagcggagacaacccgtacctcaagtacaaccacgccgacgcggagtttcaggagcgccttaaagaagatacgtcttttgggggcaacctcggacgagcagtcttccaggcgaaaaagagggttcttgaacctctgggcctggttgaggaacctgttaagacggctccgggaaaaaagaggccggtagagcagtcgccacaagagccagactcctcctcgggcatcggcaagaaaggccagcagcccgctaaaaagagactcaattttggtcagactggcgactcagagtcagtccccgacccacaacctctcggagaacctccagcaacccccgctgctgtgggacctactacaatggcttcaggcggtggcgcaccaatggcggacaataacgaaggcgccgatggagtgggtaatgcctcaggaaattggcattgcgattccacatggctgggcgacagagtcatcaccaccagcacccgaacatgggccttgcccacctataacaaccacctctacaagcaaatctccagtgcttcaacgggggccagcaacgacaaccactacttcggctacagcaccccctgggggtattttgacttcaacagattccactgccacttctcaccacgtgactggcagcgactcatcaacaacaactggggattccggcctaagcgactcaacttcaagctcttcaacattcaggtcaaagaggttacggacaacaatggagtcaagaccatcgccaataaccttaccagcacggtccaggtcttcacggactcagactatcagctcccgtacgttctcggctctgcccaccagggctgcctgcctccgttcccggcggacgtgttcatgattccccagtacggctacctaacactcaacaacggtagtcaggccgtgggacgctcctccttctactgcctggaatactttccttcgcagatgctgagaaccggcaacaacttccagtttacttacaccttcgaggacgtgcctttccacagcagctacgcccacagccagagcttggaccggctgatgaatcctctgattgaccagtacctgtactacttgtctcggactcaaacaacaggaggcacggcaaatacgcagactctgggcttcagccaaggtgggcctaatacaatggccaatcaggcaaagaactggctgccaggaccctgttaccgccaacaacgcgtctcaacgacaaccgggcaaaacaacaatagcaactttgcctggactgctgggaccaaataccatctgaatggaagaaattcattggctaatcctggcatcgctatggcaacacacaaagacgacaaggagcgtttttttcccagtaacgggatcctgatttttggcaaacaaaatgctgccagagacaatgcggattacagcgatgtcatgctcaccagcgaggaagaaatcaaaaccactaaccctgtggctacagaggaatacggtatcgtggcagataacttgcagcagcaaaacacggctcctcaaattggaactgtcaacagccagggggccttacccggtatggtctggcagaaccgggacgtgtacctgcagggtcccatctgggccaagattcctcacacggacggcaacttccacccgtctccgctgatgggcggctttggcctgaaacatcctccgcctcagatcctgatcaagaacacgcctgtacctgcggatcctccgaccaccttcaaccagtcaaagctgaactctttcatcacgcaatacagcaccggacaggtcagcgtggaaattgaatgggagctgcagaaggaaaacagcaagcgctggaaccccgagatccagtacacctccaactactacaaatctacaagtgtggactttgctgttaatacagaaggcgtgtactctgaaccccaccccattggcacccgttacctcacccgtcccctg

SEQ ID NO: 1089 - DNA, 2211 bp, Artificial Sequence
  source: /note="Description of Artificial Sequence: Synthetic polynucleotide"
atggctgccgatggttatcttccagattggctcgaggacactctctctgaaggaataagacagtggtggaagctcaaacctggcccaccaccaccaaagcccgcagagcggcataaggacgacagcaggggtcttgtgcttcctgggtacaagtacctcggacccttcaacggactcgacaagggagagccggtcaacgaggcagacgccgcggccctcgagcacgacaaagcctacgaccagcagctccaagcgggtgacaatccgtacctgcggtataaccacgccgacgccgagtttcaggagcgtcttcaaggagatacgtcttttgggggcaacctcggacgagcagtcttccaggccaaaaagaggcttcttgaacctcttggtctggttgaggaagcggctaagacggctcctggaaagaagaggcctgtagagcagtctcctcaggaaccggactcctccgcgggtattggcaaatcgggtgcacagcccgctaaaaagagactcaatttcggtcagactggcgacacagagtcagtcccagaccctcaaccaatcggagaacctcccgcagccccctcaggtgtgggatctcttacaatggcttcaggtggtggcgcaccagtggcagacaataacgaaggtgccgatggagtgggtagttcctcgggaaattggcattgcgattcccaatggctgggggacagagtcatcaccaccagcacccgaacatgggccttgcccacctataacaaccacctctacaagcaaatctccagtgcttcaacgggggccagcaacgacaaccactacttcggctacagcaccccctgggggtattttgacttcaaccgcttccactgccacttctcaccacgtgactggcagcgactcatcaacaacaactggggattccggcccaagagactcagcttcaagctcttcaaccatccaggtcaaggaggtcacgcagaatgaaggcaccaagaccatcgccaataacctcaccagcacatccaggtgtttacggactcggagtaccagctgccgtacgttctcggctctgcccaccagggctgcctgcctccgttcccggcggacgtgttcatgattccccagtacggctacctaacactcaacaacggtagtcaggccgtgggacgctcctccttctactgcctggaatactttccttcgcagatgctgagaaccggcaacaacttccagttcacttacaccttcgaggacgtgcctttccacagcagctacgcgcacagccagagcttggaccggctgatgaatcctctgattgaccagtacctgtactacttgtctcggactcaaacaacaggaggcacggcaaatacgcagactctgggcttcagccaaggtgggcctaatacaatggccaatcaggcaaagaactggctgccaggaccctgttaccgccaacaacgcgtctcaacgacaaccgggcaaaacaacaatagcaactttgcctggactgctgggaccaaataccatctgaatggaagaaattcattgggtaatcctggcatcgctatggcaacacacaaagacgacaaggagcgtttttttcccagtaacgggatcctgatttttggcaaacaaaatgctgccagagacaatgcggattacagcgatgtcatgctcaccagcgaggaagaaatcaaaaccactaaccctgtggctacagaggaatacggtatcgtggcagataacttgcagcagcaaaacacggctcctcaaattggaactgtcaacagccagggggccttacccggtatggtctggcagaaccgggacgtgtacctgcagggtcccatctgggccaagattcctcacacggacggcaacttccacccgtctccgctgatgggcggctttggcctgaaacatcctccgcctcagatcctcatcaaaaacacacctgtacctgcggatcctccaacggccttcaaccagtcaaagctgaactctttcatcacgcaatacagcaccggacaggtcagcgtggaaattgaatgggagctgcagaaggaaaacagcaagcgctggaaccccgagatccagtacacctccaactactacaaatctacaagtgtggactttgctgttaatacagaaggcgtgtactctgaaccccaccccattggcacccgttacctcacccgtcccctgtaa

SEQ ID NO: 1090 - DNA, 2214 bp, Artificial Sequence
  source: /note="Description of Artificial Sequence: Synthetic polynucleotide"
atggctgccgatggttatcttccagattggctcgaggacaacctctctgagggcattcgcgagtggtgggacttgaaacatggagccccgaaacccaaagccaaccagcaaaagcaggacgacggccggggtctggtgcttcctggctacaagtacctcggacccttcaacggactcgacaagggggagcccgtcaacgcggcggatgcagcggccctcgagcacgacaaggcctacgaccagcagctcaaagcgggtgacaatccgtacctgcggtataaccacgccgacgccgagtttcaggagcgtctgcaagaagatacgtcttttgggggcaacctcgggcgagcagtcttccaggccaagaagagggttctcgaaccttttggtctggttgaggaaggtgctaagacggctcctggaaagaaacgtccggtagagcagtcgccacaagagccagactcctcctcgggcattggcaagacaggccagcagcccgctaaaaagagactcaattttggtcagactggcgactcagagtcagtccccgacccacaacctctcggagaacctccagcaacccccgctgctgtgggacctactacaatggcttcaggcggtggcgcaccaatggcagacaataacgaaggcgccgacggagtgggtaatgcctcaggaaattggcattgcgattccacatggctgggcgacagagtcatcaccaccagcacccgaacatgggccttgcccacctataacaaccacctctacaagcaaatctccaacgggacttcgggaggaagcaccaacgacaacacctacttcggctacagcaccccctgggggtattttgactttaacagattccactgccacttctcaccacgtgactggcagcgactcatcaacaacaactggggattccggcccaagagactcaacttcaaactcttcaacatccaagtcaaggaggtcacgcagaatgaaggcaccaagaccatcgccaataacctcaccagcaccatccaggtgtttacggactcggagtaccagctgccgtacgttctcggctccgcccaccagggctgcctgcctccgttcccggcggacgtgttcatgattccccagtacggctacctaacactcaacaacggtagtcaggccgtgggacgctcctccttctactgcctggaatactttccttcgcagatgctgagaacgggcaacaactttaccttcagctacacctttgaggacgttcctttccacagcagctacgctcacagccagagtctggaccgtctcatgaatcctctgattgaccagtacctgtactacttgtctcggactcaaacaacaggaggcacggcaaatacgcagactctgggcttcagccaaggtgggcctaatacaatggccaatcaggcaaagaactggctgccaggaccctgttaccgccaacaacgcgtctcaacgacaaccgggcaaaacaacaatagcaactttgcctggactgctgggaccaaataccatctgaatggaagaaattcattggctaatcctggcatcgctatggcaacacacaaagacgacaaggagcgtttttttcccagtaacgggatcctgatttttggcaaacaaaatgctgccagagacaatgcggattacagcgatgtcatgctcaccagcgaggaagaaatcaaaaccactaaccctgtggctacagaggaatacggtatcgtggcagataacttgcagcagcaaaacacggctcctcaaattggaactgtcaacagccagggggccttacccggtatggtctggcagaaccgggacgtgtacctgcagggtcccatctgggccaagattcctcacacggacggcaacttccacccgtctccgctgatgggcggctttggcctgaaacatcctccgcctcagatcctgatcaagaacacgcctgtacctgcggatcctccgaccaccttcaaccagtcaaagctgaactctttcatcacgcaatacagcaccggacaggtcagcgtggaaattgaatgggagctgcagaaggaaaacagcaagcgctggaaccccgagatccagtacacctccaactactacaaatctacaagtgtggactttgctgttaatacagaaggcgtgtactctgatccccaccccattggcacccgttacctcacccgtcccctgtaa

SEQ ID NO: 1091 - DNA, 2214 bp, Artificial Sequence
  source: /note="Description of Artificial Sequence: Synthetic polynucleotide"
atggctgccgatggttatcttccagattggctcgaggacaacctctctgagggcattcgcgagtggtgggcgctgaaacctggagccccgaagcccaaagccaaccagcaaaagcaggacgacggccggggtctggtgcttcctggctacaagtacctcggacccttcaacggactcgacaaaggagagccggtcaacgaggcggacgcggcagccctcgaacacgacaaggcctacgaccagcagctcaaagcgggtgacaatccgtacctgcggtataaccacgccgacgccgagtttcaggagcgtctgcaagaagatacgtcttttgggggcaacctcgggcgagcagtcttccaggccaagaagcgggttctcgaacctctcggtctggttgaggaaggcgctaagacggctcctggaaagaagagaccggtagagccatcaccccagcgttctccagactcctctacgggcatcggcaagaaaggccagcagcccgccagaaaaagactcaattttggtcagactggcgactcagagtcagttccagaccctcaacctctcggagaacctccagcagcgccctctggtgtgggacctaatacaatggcttcaggcggtggcgcaccaatggcagacaataacgagggcgccgacggagtgggtaattcctcgggaaattggcattgcgattccacatggatgggcgacagagtcatcaccaccagcacccgaacctgggccctgcccacctacaacaaccacctctacaagcaaatctccagtgcttcaacgggggccagcaacgacaaccactacttcggctacagcaccccctgggggtattttgactttaacagattccactgccacttttcaccacgtgactggcagcgactcatcaacaacaactggggattccggcccaagagactcaacttcaagctcttcaacatccaagtcaaggaggtcacgcagaatgaaggcaccaagaccatcgccaataacctcaccagcaccatccaggtgtttacggactcggagtaccagctgccgtacgttctcggctctgcccaccagggctgcctgcctccgttcccggcggacgtgttcatgattccccagtacggctacctaacactcaacaacggtagtcaggccgtgggacgctcctccttctactgcctggaatactttccttcgcagatgctgagaaccggcaacaacttccagtttacttacaccttcgaggacgtgcctttccacagcagctacgcgcacagccagagcttggaccggctgatgaatcctctgattgaccagtacctgtactacttgtctcggactcaaacaacaggaggcacggcaaatacgcagactctgggcttcagccaaggtgggcctaatacaatggccaatcaggcaaagaactggctgccaggaccctgttaccgccaacaacgcgtctcaacgacaaccgggcaaaacaacaatagcaactttgcctggactgctgggaccaaataccatctgaatggaagaaattcattggctaatcctggcatcgctatggcaacacacaaagacgacaaggagcgtttttttcccagtaacgggatcctgatttttggcaaacaaaatgctgccagagacaatgcggattacagcgatgtcatgctcaccagcgaggaagaaatcaaaaccactaaccctgtggctacagaggaatacggtatcgtggcagataacttgcagcagcaaaacacggctcctcaaattggaactgtcaacagccagggggccttacccggtatggtctggcagaaccgggacgtgtacctgcagggtcccatctgggccaagattcctcacacggacggcaacttccacccgtctccgctgatgggcggctttggcctgaaacatcctccgcctcagatcctgatcaagaacacgcctgtacctgcggatcctccgaccaccttcaaccagtcaaagctgaactctttcatcacacaatacagcaccggacaggtcagcgtggaaattgaatgggagctgcagaaggaaaacagcaagcgctggaaccccgagatccagtacacctccaactactacaaatctacaagtgtggactttgctgttaatacagaaggcgtgtactctgaaccccaccccattggcacccgttacctcacccgtcccctgtaa

SEQ ID NO: 1092 - DNA, 2211 bp, Artificial Sequence
  source: /note="Description of Artificial Sequence: Synthetic polynucleotide"
  modified_base (676)..(676): a, c, t, or g
atggctgccgatggttatcttccagattggctcgaggacactctctctgaaggaataagacagtggtggaagctcaaacctggcccaccaccaccaaagcccgcagagcggcataaggacgacagcaggggtcttgtgcttcctgggtacaagtacctcggacccttcaacggactcgacaagggagagccggtcaacgaggcagacgccgcggccctcgagcacgacaaagcctacgaccggcagctcgacagcggagacaacccgtacctcaagtacaaccacgccgacgcggagtttcaggagcgccttaaagaagatacgtcttttgggggcaacctcggacgagcagtcttccaggcgaaaaagagggttcttgaacctctgggcctggttgaggaacctgttaagacggctccgggaaaaaagaggccggtagagcagtcgccacaagagccagactcctcctcgggcatcggcaagaaaggccagcagcccgctaaaaagagactcaattttggtcagactggcgactcagagtcagtccccgacccacaacctctcggagaacctccagcaacccccgctgctgtgggacctactacaatggcttcaggcggtggcgcaccaatggcggacaataacgaaggcgccgatggagtgggtaatgcctcangaaattggcattgcgattccacatggctgggcgacagagtcatcaccaccagcacccgaacatgggccttgccacctataacaaccacctctacaagcaaatctccagtgcttcaacgggggcgcagcaacgacaaccactacttcggctacagcaccccctgggggtattttgacttcaacagattccactgccacttctcaccacgtgactggcagcgactcatcaacaacaactggggattccggcctaagcgactcaacttcaagctcttcaacattcaggtcaaagaggttacggacaacaatggagtcaagaccatcgccaataaccttaccagcacggtccaggtcttcacggactcagactatcagctcccgtacgttctcggctctgcccaccagggctgcctgcctccgttcccggcggacgtgttcatgattccccagtacggctacctaacactcaacaacggtagtcaggccgtgggacgctcctccttctactgcctggaatactttccttcgcagatgctgagaaccggcaacaacttccagtttacttacaccttcgaggacgtgcctttccacagcagctacgcccacagccagagcttggaccggctgatgaatcctctgattgaccagtacctgtactacttgtctcggactcaaacaacaggaggcacggcaaatacgcagactctgggcttcagccaaggtgggcctaatacaatggccaatcaggcaaagaactggctgccaggaccctgttaccgccaacaacgcgtctcaacgacaaccgggcaaaacaacaatagcaactttgcctggactgctgggaccaaataccatctgaatggaagaaattcattggctaatcctggcatcgctatggcaacacacaaagacgacaaggagcgtttttttcccagtaacgggatcctgatttttggcaaacaaaatgctgccagagacaatgcggattacagcgatgtcatgctcaccagcgaggaagaaatcaaaaccactaaccctgtggctacagaggaatacggtatcgtggcagataacttgcagcagcaaaacacggctcctcaaattggaactgtcaacagccagggggccttacccggtatggtttggcagaaccgggacgtgtacctgcagggtcccatctgggccaagattcctcacacggacggcaacttccacccgtctccgctgatgggcggctttggcctgaaacatcctccgcctcagatcctgatcaagaacacgcctgtacctgcggatcctccgaccaccttcaaccagtcaaagctgaactctttcatcacacagtactccacgggacaggtcagcgtggaaattgaatgggagctgcagaaggaaaacagcaagcgctggaacccggagatccagtacacttccaactactacaaatctacaaatgtggactttgctgttaacacagaaggcgtgtactctgaaccccaccccattggcacccgttacctcacccgtcccctgtaa

SEQ ID NO: 1093 - DNA, 2211 bp, Artificial Sequence
  source: /note="Description of Artificial Sequence: Synthetic polynucleotide"
  modified_base (715)..(715): a, c, t, or g
atggctgccgatggttatcttccagattggctcgaggacaacctctctgagggcattcgcgagtggtgggacttgaaacctggagccccgaaacccaaagccaaccagcaaaagcaggacgacggccggggtctggtgcttcctggctacaagtacctcggacccttcaacggactcgacaagggggagcccgtcaacgcggcggatgcagcggccctcgagcacgacaaggcctacgaccagcagctccaagcgggtgacaatccgtacctgcggtataaccacgccgacgccgagtttcaggagcgtcttcaaggagatacgtcttttgggggcaacctcggacgagcagtcttccaggccaagaagcgggttctcgaacctctcggtctggttgaggaagcggctaagacggctcctggaaagaagaggcctgtagagcagtctcctcaggaaccggactcctccgcgggtattggcaaatcgggtgcacagcccgctaaaaagagactcaatttcggtcagactggcgacacagagtcagtcccagaccctcaaccaatcggagaacctcccgcagccccctctggtgtgggacctaatacaatggctgcaggcggtggcgcaccaatggcagacaataacgaaggcgccgatggagtgggtagttcctcgggaaattggcattgcgattccacatggctgggcgacagantcatcaccaccagcacccgaacctgggccctgcccacctataacaaccatctctacaagcaaatctccagtgcttcaacgggggccagcaacgacaaccactacttcggctacagcaccccctgggggtattttgacttcaacagattccactgccacttctcaccacgtgactggcagcgactcatcaacaacaactggggattccggcctaagcgactcaacttcaagctcttcaacattcaggtcaaagaggttacggacaacaatggagtcaagaccatcgccaataaccttaccagcacggtccaggtcttcacggactcggagtaccagttgccgtacgtcctcggctctgcgcaccagggctgcctgcctccgttcccggcggacgtgttcatgattccgcagtacggctacctaacgctcaacaatggcagccaggcagtgggacggtcatccttttactgcctggaatatttcccatcgcagatgctgagaacgggcaacaactttaccttcagctacacttttgaggacgttcctttccacagcagctacgctcacagccagagtctggaccgtctcatgaatcctctgattgaccagtacctgtactacttgtctcggactcaaacaacaggaggcacggcaaatacgcagactctgggcttcagccaaggtgggcctaatacaatggccaatcaggcaaagaactggctgccaggaccctgttaccgccaacaacgcgtctcaacgacaaccggacaaaacaacaatagcaactttgcctggactgctgggaccaaataccatctgaatggaagaaattcattggctaatcctggcatcgctatggcaacacacaaagacgacaaggagcgtttttttcccagtaacgggatcctgatttttggcaaacaaaatgctgccagagacaatgcggattacagcgatgtcatgctcaccagcgaggaagaaatcaaaaccactaaccctgtggctacagaggaatacggtatcgtggcagataactttcagcagcaaaacacggctcctcaaattggaactgtcaacagccagggggccttacccggtatggtctggcagaaccgggacgtgtacctgcagggtcccatctgggccaagattcctcacacggacggcaacttccacccgtctccgctgatgggcggctttggcctgaaacatcctccgcctcagatcctgatcaagaacacgcctgtacctgcggatcctccgaccaccttcaaccagtcaaagctgaactctttcatcacgcaatacagcaccggacaggtcagcgtggaaattgaatgggagctgcagaaggaaaacagcaagcgctggaaccccgagatccagtacacctccaactactacaaatctacaagtgtggactttgctgttaatacagaaggcgtgtactctgaaccccaccccattggcacccgttacctcacccgtcccctgtaa

SEQ ID NO: 1094 - DNA, 2211 bp, Artificial Sequence
  source: /note="Description of Artificial Sequence: Synthetic polynucleotide"
atggctgccgatggttatcttccagattggctcgaggacaacctctctgagggcattcgcgagtggtgggcgctgaaacctggagccccgaagcccaaagccaaccagcaaaagcaggacgacggccggggtctggtgcttcctggctacaagtacctcggacccttcaacggactcgacaaaggagagccggtcaacgaggcggacgcggcagccctcgaacacgacaaagcttacgaccagcagctcaaggccggtgacaacccctacctcaagtataaccacgccgacgccgagtttcaggagcgtctgcaagaagatacgtcttttgggggcaacctcgggcgagcagtcttccaggccaaaaagaggcttcttgaacctcttggtctggttgaggaagcggctaagacggctcctggaaagaagaggcctgtagagcagtctcctcaggaaccggactcctccgcgggtattggcaaatcgggtgcacagcccgctaaaaagagactcaatttcggtcagactggcgacacagagtcagtcccagacccacaacctctcggagaacctccagcaacccccgctgctgtgggacctactacaatggcttcaggcggtggcgcaccaatggcggacaataacgaaggcgccgatggagtgggtaatgcctcaggaaattggcattgcgattccacatggctgggcgacagagtcatcaccaccagcacccgaacatgggccttgcccacctataacaaccacctctacaagcaaatctccagtgcttcaacgggggccagcaacgacaaccactacttcggctacagcaccccctgggggtattttgacttcaacagattccactgccacttctcaccacgtgactggcagcgactcatcaacaacaactggggattccggcccaagagactcagcttcaagctcttcaacatccaggtcaaggaggtcacgcagaatgaaggcaccaagaccatcgccaataacctcaccagcaccatccaggtgtttacggactcggagtaccagctgccgtacgttctcggctccgcccaccagggctgcctgcctccgttcccggcggacgtgttcatgattccccagtacggctacctaacactcaacaacggtagtcaggccgtgggacgctcctccttctactgcctggaatactttccttcgcagatgctgagaaccggcaacaacttccagtttacttacaccttcgaggacgtgcctttccacagcagctacgcccacagccagagcttggaccggctgatgaatcctctgattgaccagtacctgtactacttgtctcggactcaaacaacaggaggcacggcaaatacgcagactctgggcttcagccaaggtgggcctaatacaatggccaatcaggcaaagaactggctgccaggaccctgttaccgccaacaacgcgtctcaacgacaaccgggcaaaacaacaatagcaactttgcctggactgctgggaccaaataccatctgaatggaagaaattcattggctaatcctggcatcgctatggcaacacacaaagacgacaaggagcgtttttttcccagtaacgggatcctgatttttggcaaacaaaatgctgccagagacaatgcggattacagcgatgtcatgctcaccagcgaggaagaaatcaaaaccactaaccctgtggctacagaggaatacggtatcgtggcagataacttgcagcagcaaaacacggctcctcaaattggaactgtcaacagccagggggccttacccggtatggtctggcagaaccgggacgtgtacctgcagggtcccatctgggccaagattcctcacacggacggcaacttccacccgtctccgctgatgggcggctttggcctgaaacatcctccgcctcagatcctgatcaagaacacgcctgtacctgcggatcctccgaccaccttcaaccagtcaaagctgaactctttcatcacgcaatacagcaccggacaggtcagcgtggaaattgaatgggagctgcagaaggaaaacagcaagcgctggaaccccgagatccagtacacctccaactactacaaatctacaagtgtggactttgctgttaatacagaaggcgtgtactctgaaccccaccccattggcacccgttacctcacccgtcccctgtaa

SEQ ID NO: 1095 - DNA, 2211 bp, Artificial Sequence
  source: /note="Description of Artificial Sequence: Synthetic polynucleotide"
atggctgccgatggttatcttccagattggctcgaggacactctctctgaaggaataagacagtggtggaagctcaaacctggcccaccaccaccaaagcccgcagagcggcataaggacgacagcaggggtcttgtgcttcctgggtacaagtacctcggacccttcaacggactcgacaagggagagccggtcaacgaggcagacgccgcggccctcgagcacgacaaagcctacgaccagcagctccaagcgggtgacaatccgtacctgcggtataaccacgccgacgccgagtttcaggagcgtcttcaaggagatacgtcttttgggggcaacctcggacgagcagtcttccaggccaaaaagaggcttcttgaacctcttggtctggttgaggaagcggctaagacggctcctggaaagaagaggcctgtagagcagtctcctcaggaaccggactcctccgcgggtattggcaaatcgggtgcacagcccgctaaaaagagactcaatttcggtcagactggcgacacagagtcagtcccagaccctcaaccaatcggagaacctcccgcagccccctcaggtgtgggatctcttacaatggcttcaggtggtggcgcaccagtggcagacaataacgaaggtgccgatggagtgggtagttcctcgggaaattggcattgcgattcccaatggctgggggacagagtcatcaccaccagcacccgaacatgggccttgcccacctataacaaccacctctacaagcaaatctccagtgcttcaacgggggccagcaacgacaaccactacttcggctacagcaccccctgggggtattttgacttcaaccgcttccactgccacttctcaccacgtgactggcagcgactcatcaacaacaactggggattccggcccaagagactcagcttcaagctcttcaacatccaggtcaaggaggtcacgcagaatgaaggcaccaagaccatcgccaataacctcaccagcaccatccaggtgtttacggactcggagtaccagctgccgtacgttctcggctctgcccaccagggctgcctgcctccgttcccggcggacgtgttcatgattccccagtacggctacctaacactcaacaacggtagtcaggccgtgggacgctcctccttctactgcctggaatactttccttcgcagatgctgagaaccggcaacaacttccagtttacttacaccttcgaggacgtgcctttccacagcagctacgcccacagccagagcttggaccggctgatgaatcctctgattgaccagtacctgtactacttgtctcggactcaaacaacaggaggcacggcaaatacgcagactctgggcttcagccaaggtgggcctaatacaatggccaatcaggcaaagaactggctgccaggaccctgttaccgccaacaacgcgtctcaacgacaaccgggcaaaacaacaatagcaactttgcctggactgctgggaccaaataccatctgaatggaagaaattcattggctaatcctggcatcgctatggcaacacacaaagacgacaaggagcgtttttttcccagtaacgggatcctgatttttggcaaacaaaatgctgccagagacaatgcggattacagcgatgtcatgctcaccagcgaggaagaaatcaaaaccactaaccctgtggctacagaggaatacggtatcgtggcagataacttgcagcagcaaaacacggctcctcaaattggaactgtcaacagccagggggccttacccggtatggtctggcagaaccgggacgtgtacctgcagggtcccatctgggccaagattcctcacacggacggcaacttccacccgtctccgctgatgggcggctttggcctgaaacatcctccgcctcagatcctgatcaagaacacgcctgtacctgcggatcctccgaccaccttcaaccagtcaaagctgaactctttcatcacgcaatacagcaccggacaggtcagcgtggaaattgaatgggagctgcagaaggaaaacagcaagcgctggaaccccgagatccagtacacctccaactactacaaatctacaagtgtggactttgctgttaatacagaaggcgtgtactctgaaccccaccccattggcacccgttacctcacccgtcccctgtaa

SEQ ID NO: 1096 - DNA, 2217 bp, Artificial Sequence
  source: /note="Description of Artificial Sequence: Synthetic polynucleotide"
atggctgccgatggttatcttccagattggctcgaggacaacctctctgagggaataagacagtggtggaagctcaaacctggcccaccaccaccaaagcccgcagagcggcataaggacgacagcaggggtcttgtgcttcctgggtacaagtacctcggacccttcaacggactcgacaagggagagccggtcaacgcggcggacgcagcggccctcgagcacgacaaggcctacgaccagcagctcaaagcgggtgacaatccgtacctgcggtataaccacgccgacgccgagtttcaggagcgtctgcaagaagatacgtcttttgggggcaacctcgggcgagcagtcttccaggccaagaagcgggttctcgaacctctcggtctggttgaggaaggcgctaagacggctcctggaaagaagagaccggtagagccatcaccccagcgttctccagactcctctacgggcatcggcaagaaaggccagcagcccgctaaaaagagactcaattttggtcagactggcgactcagagtcagtccccgacccacaacctctcggagaacctccagcaacccccgctgctgtgggacctactacaatggcttcaggcggtggcgcaccaatggcagacaataacgaaggcgccgacggagtgggtaatgcctcaggaaattggcattgcgattccacatggctgggggacagagtcatcaccaccagcacccgaacctgggccctgcccacctacaacaaccacctctacaagcaaatctccaacgggacttcgggaggaagcaccaacgacaacacctacttcggctgcgtcacgccctgggggtattttgactttaacaaattccactgccacttttcaccggatgactggcaacgactcatcaacaacggctggggattccggactaagcgactcaacttcaagctcttcagcatgaaagtcaaaaagggtacggacaacactggaatcaagaccatcgcgaataaccttaccaacacggtccatgtcttcgcggactcggagtaccagttgccgtacgtcctcggctctgcgcaccagggctgcctccctccgttcccggcggacgtgttcatgattccgcagtacggctacctaacgctcaacaatggcagccaggcagtgggacggtcatccttttactgcctggaatatttcccatcgcagatgctgagaacgggcaacaactttaccttcagctacacctttgaggacgttcctttccacagcagctacgctcacagccagagtctggaccgtctcatgaatcctctgattgaccagtacctgtactacttgtctcggactcaaacaacaggaggcacggcaaatacgcagactctgggcttcagccaaggtgggcctaatacaatggccaatcaggcaaagaactggctgccaggaccctgttaccgccaacaacgcgtctcaacgacaaccgggcaaaacaacaatagcaactttgcctggactgctgggaccaaataccatctgaatggaagaaattcattggctaatcctggcatcgctatggcaacacacaaagacgacaaggagcgtttttttcccagtaacgggatcctgatttttggcaaacaaaatgctgccagagacaatgcggattacagcgatgtcatgctcaccagcgaggaagaaatcaaaaccactaaccctgtggctacagaggaatacggtatcgtggcagataacttgcagcagcaaaacacggctcctcaaattggaactgtcaacagccagggggccttacccggtatggtctggcagaaccgggacgtgtacctgcagggtcccatctgggccaagattcctcacacggacggcaacttccacccgtctccgctgatgggcggctttggcctgaaacatcctccgcctcagatcctgatcaagaacacgcctgtacctgcggatcctccgaccaccttcaaccagtcaaagctgaactctttcatcacgcaatacagcaccggacaggtcagcgtggagatcgagtgggagctgcagaaggaaaacagcaagcgctggaacccggagatccagtacacctccaactactacaaatctacaagtgtggactttgctgttaatacagaaggcgtgtactctgaaccccaccccattggcacccgttacctcacccgtcccctgtaa

SEQ ID NO: 1097 - DNA, 2214 bp, Artificial Sequence
  source: /note="Description of Artificial Sequence: Synthetic polynucleotide"
atggctgccgatggttatcttccagattggctcgaggacactctctctgaaggaataagacagtggtggaagctcaaacctggcccaccaccaccaaagcccgcagagcggcataaggacgacagcaggggtcttgtgcttcctgggtacaagtacctcggacccttcaacggactcgacaagggggagcccgtcaacgcggcggacgcagcggccctcgagcacgacaaggcctacgaccagcagctcaaagcgggtgacaatccgtacctgcggtataaccacgccgacgccgagtttcaggagcgtctgcaagaagatacgtcttttgggggcaacctcgggcgagcagtcttccaggccaagaagcgggttctcgaacctctcggtctggttgaggaaggcgctaagacggctcctggaaagaagagaccggtagagccatcaccccagcgttctccagactcctctacgggcatcggcaagaaaggccagcagcccgcgaaaaagagactcaactttgggcagactggcgactcagagtcagtgcccgaccctcaaccaatcggagaaccccccgcaggcccctctggtctgggatctggtacaatggctgcaggcggtggcgctccaatggcagacaataacgaaggcgccgatggagtgggtagttcctcgggaaattggcattgcgattccacatggctgggggacagagtcatcaccaccagcacccgaacctgggccctgcccacctacaacaaccacctctacaaacaaatttccagcgcttcaacgggagcctcgaacgacaatcactactttggctacagcaccccctgggggtattttgacttcaacagattccactgccacttctcaccacgtgactggcagcgactcatcaacaacaactggggattccggcctaagcgactcaacttcaagctcttcaacattcaggtcaaagaggttacggacaacaatggagtcaagaccatcgccaataaccttaccagcacggtccaggtcttcacggactcggagtaccagttgccgtacgtcctcggctctgcgcaccagggctgcctccctccgttcccggcggacgtgttcatgattccgcagtacggctacctaacgctcaacaatggcagccaggcagtgggacggtcatccttttactgcctggaatatttcccatcgcagatgctgagaacgggcaacaactttaccttcagctacacctttgaggacgttcctttccacagcagctacgctcacagccagagtctggaccgtctcatgaatcctctgattgaccagtacctgtactacttgtctcggactcaaacaacaggaggcacggcaaatacgcagactctgggcttcagccaaggtgggcctaatacaatggccaatcaggcaaagaactggctgccaggaccctgttaccgccaacaacgcgtctcaacgacaaccgggcaaaacaacaatagcaactttgcctggactgctgggaccaaataccatctgaatggaagaaattcattggctaatcctggcatcgctatggcaacacacaaagacgacaaggagcgtttttttcccagtaacgggatcctgatttttggcaaacaaaatgctgccagagacaatgcggattacagcgatgtcatgctcaccagcgaggaagaaatcaaaaccactaaccctgtggctacagaggaatacggtatcgtggcagataacctgcagcagcaaaacacggctcctcaaattggaactgtcaacagccagggggccttacccggtatggtctggcagaaccgggacgtgtacctgcagggtcccatctgggccaagattcttcacacggacggcaactttcacccttctccgctgatgggagggtttggaatgaagcacccgcctcctccgatcctgatcaagaacacgcctgtacctgcggatcctccgaccaccttcaaccagtcaaagctgaactctttcatcacgcaatacagcaccggacaggtcagcgtggaaattgaatgggagctgccgaaggaaaacagcaagcgctggaaccccgagatccagtacacctccaactactacaaatctacaagtgtggactttgctgttaatacagaaggtgtgtactatgaaccccaccccattggcacccgttacctcacccctcccctgtaa

SEQ ID NO: 1098 - DNA, 2214 bp, Artificial Sequence
  source: /note="Description of Artificial Sequence: Synthetic polynucleotide"
atggctgccgatggttatcttccagattggctcgaggacaacctctctgagggcattcgcgagtggtgggcgctgaaacctggagccccgaagcccaaagccaaccagcaaaagcaggacgacggccggggtctggtgcttcctggctacaagtacctcggacccttcaacggactcgacaagggggagcccgtcaacgcggcggacgcagcggccctcgagcacgacaaggcctacgaccagcagctcaaagcgggtgacaatccgtacctgcggtataaccacgccgacgccgagtttcaggagcgtctgcaagaagatacgtcttttgggggcaacctcgggcgagcagtcttccaggccaagaagcgggttctcgaacctctcggtctggttgaggaaggcgctaagacggctcctggaaagaagagaccggtagagccatcaccccagcgctctccagactcctctacgggcatcggcaagaaaggccaacagcccgccagaaaaagactcaattttggtcagactggcgactcagagtcagttccagaccctcaacctctcggagaacctccagcagcgccctctggtgtggcacctaatacaatggctgcaggcggtggcgcaccaatggcagacaataacgaaggcgccgacggagtgggtaatgcctcaggaaattggcattgcgattccacatggctgggcgacagagtcatcaccaccagcacccgaacatgggccttgcccacctataacaaccacctctacaagcaaatctccagtgcttcaacgggggccagcaacgacaaccactacttcggctacagcaccccctgggggtattttgatttcaacagattccactgccacttttcaccacgtgactggcagcgactcatcacaacaattgggggattccggcctaagcgactcaacttcaagctcttcaacattcaggtcaaagaggttacggacaacaatggagtcaagaccatcgccaataaccttaccagcacggtccaggtcttcacggactcggagtaccagttgccgtacgtcctcggctctgcgcaccagggctgcctccctccgttcccggcggacgtgttcatgattccgcagtacggctacctaacgctcaacaatggcagccaggcagtgggacggtcatccttttactgcctggaatatttcccatcgcagatgctgagaacgggcaacaactttaccttcagctacacctttgaggacgttcctttccacagcagctacgctcacagccagagtctggaccggctgatgaatcctctgattgaccagtacctgtactacttgtctcggactcaaacaacaggaggcacggcaaatacgcagactctgggcttcagccaaggtgggcctaatacaatggccaatcaggcaaagaactggctgccaggaccctgttaccgccaacaacgcgtctcaacgacaaccgggcaaaacaacaatagcaactttgcctggactgctgggaccaaataccatctgaatggaagaaattcattggctaatcctggcatcgctatggcaacacacaaagacgacaaggagcgtttttttcccagtaacgggatcctgatttttggcaaacaaaatgctgccagagacaatgcggattacagcgatgtcatgctcaccagcgaggaagaaatcaaaaccactaaccctgtggctacagaggaatacggtatcgtggcagataacttgcagcagcaaaacacggctcctcaaattggaactgtcaacagccagggggccttacccggtatggtctggcagaaccgggacgtgtacctgcagggtcccatctgggccaagattcctcacacggacggcaacttccacccgtctccgctgatgggcggctttggcctgaaacatcctccgcctcagatcctgatcaagaacacgcctgtacctgcggatcctccgaccaccttcaaccagtcaaagctgaactctttcatcacgcaatacagcaccggacaggtcagcgtggaaattgaatgggagctgcagaaggaaaacagcaagcgctggaaccccgagatccagtacacctccaactactacaaatctacaagtgtggactttgctgttaatacagaaggcgtgtactctgaaccccaccccattggcacccgttacctcacccgtcccctgtaa

SEQ ID NO: 1099 - DNA, 2211 bp, Artificial Sequence
  source: /note="Description of Artificial Sequence: Synthetic polynucleotide"
atggctgccgatggttatcttccagattggctcgaggacactctctctgaaggaataagacagtggtggaagctcaaacctggcccaccaccaccaaagcccgcagagcggcataaggacgacggccggggtctggtgcttcctggctacaagtacctcggacccttcaacggactcgacaagggggagcccgtcaacgcggcggacgcagcggccctcgagcacgacaaggcctacgaccagcagctcaaagcgggtgacaatccgtacctgcggtataaccacgccgacgccgagtttcaggagcgtctgcaagaagatacgtcttttgggggcaacctcggacgagcagtcttccaggcgaaaaagagggttcttgaacctctgggcctggttgaggaacctgttaagacggctccgggaaaaaagaggccggtagagcagtcgccacaagagccagactcctcctcgggcatcggcaagaaaggccagcagcccgctaaaaagagactcaattttggtcagactggcgactcagagtcagtccccgacccacaacctctcggagaacctccagcaacccccgctgctgtgggacctactacaatggcttcaggcggtggcgcaccaatggcagacaataacgaaggcgccgacggagtgggtaatgcctcaggaaattggcattgcgattccacatggatgggcgacagagtcatcaccaccagcacccgaacatgggccttgcccacctataacaaccacctctacaagcaaatctccagtgcttcaacgggggccagcaacgacaaccactacttcggctacagcaccccctgggggtattttgactttaacagattccactgccacttttcaccacgtgactggcagcgactcatcaacaacaactggggattccggcctaagcgactcaacttcaagctcttcaacattcaggtcaaggaggtcacgcagaatgaaggcaccaagaccatcgccaataacctcaccagcaccatccaggtgtttacggactcggagtaccagctgccgtacgttctcggctccgcccaccagggctgcctgcctccgttcccggcggacgtgttcatgatcccccagtacggctacctaacactcaacaacggtagtcaggccgtgggacgctcctccttctactgcctggaatactttccttcgcagatgctgagaaccggcaacaacttccagtttacttacaccttcgaggacgtgcctttccacagcagctacgcgcacagccagagcttggaccggctgatgaatcctctgattgaccagtacctgtactacttgtctcggactcaaacaacaggaggcacggcaaatacgcagactctgggcttcagccaaggtgggcctaatacaatggccaatcacgcaaagaactggctgccaggaccctgttaccgccaacaacgcgtctcaacgacaaccgggcaaaacaacaatagcaactttgcctggactgctgggaccaaataccatctgaatggaagaaattcattggctaatcctggcatcgctatggcaacacacaaagacgacaaggagcgtttttttcccagtaacgggatcctgatttttggcaaacaaaatgctgccagagacaatgcggattacagcgatgtcatgctcaccagcgaggaagaaatcaaaaccactaaccctgtggctacagaggaatacggtatcgtggcagataacttgcagcagcaaaacacggctcctcaaattggaactgtcaacagccagggggccttacccggtatggtctggcagaaccgggacgtgtacctgcagggtcccatctgggccaagattcctcacacggacggcaacttccacccgtctccgctgatgggcggcttcggcctgaaacatcctccgcctcagatcctgatcaagaacacgcctgtacctgcggatcctccgaccaccttcaaccagtcaaagctgaactctttcatcacgcaatacagcaccggacaggtcagcgtggaaattgaatgggagctgcagaaggaaaacagcaagcgctggaaccccgagatccagtacacctccaactactacaaatctacaagtgtggactttgctgttaatacagaaggcgtgtactctgaaccccaccccattggcacccgttacctcacccgtcccctgtaa

SEQ ID NO: 1100 - DNA, 2214 bp, Artificial Sequence
  source: /note="Description of Artificial Sequence: Synthetic polynucleotide"
atggctgccgatggttatcttccagattggctcgaggacaacctctctcagggcattcgcgagtggtgggacttgaaacctggagccccgaaacccaaagccaaccagcaaaagcaggacgacggccggggtctggtgcttcctggctacaagtacctcggacccttcaacggactcgacaagggggagcccgtcaacgcggcggacgcagcggccctcgagcacgacaaggcctacgaccagcagctcaaagcgggtgacaatccgtacctgcggtataaccacgccgacgccgagtttcaggagcgtctgcaagaagatacgtcttttgggggcaacctcggacgagcagtcttccaggccaagaagcgggttctcgaacctctcggtctggttgaggaaggcgctaagacggctcctggaaagaagagaccggtagagccatcaccccagcgttctccagactcctctacgggcatcggcaagaaaggccaacagcccgccagaaaaagactcaattttggtcagactggcgactcagagtcagttccagaccctcaacctctcggagaacctccagcagcgcccgctgctgtgggacctactacaatggcttcaggcggtggcgcaccaatggcagacaataacgaaggcgccgacggagtgggtagttcctcgggaaattggcattgcgattcccaatggctgggggacagagtcatcaccaccagcacccgaacctgggccctgcccacctacaacaaccacctctacaagcaaatctccagtgcttcaacgggggccagcaacgacaaccactacttcggctacagcaccccctgggggtattttgacttcaacagattccactgccacttttcaccacgtgactggcaaagactcatcaacaacaactggggattccggcccaagagactcagcttcaagctcttcaacatccaggtcaaggaggtcacgcagaatgaaggcaccaagaccatcgccaataacctcaccagcaccatccaggtgtttacggactcggagtaccagctgccgtacgttctcggctctgcccaccagggctgcctgcctccgttcccggcggacgtgttcatgattccccagtacgggtacctgactctgaacaatggcagtcaggccgtgggccgttcctccttctactgcctggagtactttccttctcaaatgctgagaaccggcaacaacttccagtttacttacaccttcgaggacgtgcctttccacagcagctacgcccacagccagagcttggaccggctgatgaatcctctgattgaccagtacctgtactacttgtctcggactcaaacaacaggaggcacgacaaatgcgcagactctgggcttcagccaaggtgggcctaatacaatggccaatcaggcaaagaactggctgccaggaccctgttaccgccaacaacgcgtctcaacgacaaccgggcaaaacaacaatagcaactttgcctggactgctgggaccaaataccatctgaatggaagaaattcattggctaatcctggcatcgctatggcaacacacaaagacgacaaggagcgtttttttcccagtaacgggatcctgatttttggcaaacaaaatgctgccagagacaatgcggattacagcgatgtcatgctcaccagcgaggaagaaatcaaaaccactaaccctgtggctacagaggaatacggtatcgtggcagataacttgcagcagcaaaacacggctcctcaaattggaactgtcaacagccagggggccttacccggtatggtctggcagaaccgggacgtgtacctgcagggtcccatctgggccaagattcctcacacggacggcaacttccacccgtctccgctgatgggcggctttggcctgaaacatcctccgcctcagatcctgatcaagaacacgcctgtacctgcggatcctccgaccaccttcaaccagtcaaagctgaactctttcatcacacagtactccacgggacaggtcagcgtggaaattgaatgggagctgcagaaggaaaacagcaagcgctggaacccggagatccagtacacttccaactactacaaatctacaaatgtggactttgctgttaacacagaaggcgtgtactctgaaccccaccccattggcacccgttacctcacccgtcccctgtaa

SEQ ID NO: 1101 - DNA, 2211 bp, Artificial Sequence
  source: /note="Description of Artificial Sequence: Synthetic polynucleotide"
atggctgccgatggttatcttccagattggctcgaggacaacctctctgagggcattcgcgagtggtgggacttgaaacctggagccccgaaacccaaagccaaccagcaaaagcaggacgacggccggggtctggtgcttcctggctacaagtacctcggacccttcaacggactcgacaagggggagcccgtcaacgcggcggacgcagcggccctcgagcacgacaaggcctacgaccagcagctcaaagcgggtgacaatccgtacctgcggtataaccacgccgacgccgagtttcaggagcgtctgcaagaagatacgtcttttgggggcaacctcgggcgagcagtcttccaggccaagaagagggttctcgaaccttttggtctggttgaggaaggcgctaagacggctcctggaaagaaacgtccggtagagcagtcgccacaagagccagactcctcctcgggcatcggcaagacaggccagcagcccgctaaaaagagactcaatttcggtcagactggcgacacagagtcagtcccagaccctcaaccaatcggagaacctcccgcagccccctcaggtgtgggacctaatacaatggctgcaggcggtggcgcaccaatggcagacaataacgaaggcgccgacggagtgggtagttcctcgggaaattggcattgcgattccacatggatgggtgacagagtcatcaccaccagcacccgaacctgggccctgcccacctacaataaccacctctacaagcaaatctccagtgcttcaacgggggccagcaacgacaaccactacttcggctacagcaccccctgggggtattttgacttcaacagattccactgccacttctcaccacgtgactggcagcgactcatcaacaacaactggggattccggcctaagcgactcaacttcaagctcttcaacattcaggtcaaggaggtcacgcagaatgaaggcaccaagaccatcgccaataacctcaccagcaccatccaggtgtttacggactcggagtaccagctgccgtacgttctcggctctgcccaccagggctgcctgcctccgttcccggcggacgtgttcatgattccccagtacggctacctaacactcaacaacggtagtcaggccgtgggacgctcctccttctactgcctggaatactttccttcgcagatgctgagaaccggcaacaacttccagtttacttacaccttcgaggacgtgcctttccacagcagctacgcccacagccagagcttggaccggctgatgaatcctctgattgaccagtacctgtactacttgtctcggactcaaacaacaggaggcacggcaaatacgcagactctgggcttcagccaaggtgggcctaatacaatggccaatcaggcaaagaactggctgccaggaccctgttaccgccaacaacgcgtctcaacgacaaccgggcaaaacaacaatagcaactttgcctggactgctgggaccaaataccatctgaatggaagaaattcattggctaatcctggcatcgctatggcaacacacaaagacgacaaggagcgtttttttcccagtaacgggatcctgatttttggcaaacaaaatgctgccagagacaatgcggattacagcgatgtcatgctcaccagcgaggaagaaatcaaaaccactaaccctgtggctacagaggaatacggtatcgtggcagataacttgcagcagcaaaacacggctcctcaaattggaactgtcaacagccagggggccttacccggtatggtctggcagaaccgggacgtgtacctgcagggtcccatctgggccaagattcctcacacggacggcaacttccacccgtctccgctgatgggcggctttggcctgaaacatcctccgcctcagatcctgatcaagaacacgcctgtacctgcggatcctccgaccaccttcaaccagtcaaagctgaactctttcatcacacagtactccacgggacaggtcagcgtggaaattgaatgggagctgcagaaggaaaacagcaagcgctggaacccggagatccagtacacttccaactactacaaatctacaaatgtggactttgctgttaacacagaaggcgtgtactctgaaccccaccccattggcacccgttacttcacccgtcccctgtaa

SEQ ID NO: 1102 - DNA, 2211 bp, Artificial Sequence
  source: /note="Description of Artificial Sequence: Synthetic polynucleotide"
atggctgccgatggttatcttccagattggctcgaggacaacctctctgagggcattcgcgagtggtgggacttgaaacctggagccccgaaacccaaagccaaccagcaaaagcaggacgacggccggggtctggtgcttcctggctacaagtacctcggacccttcaacggactcgacaagggggagcccgtcaacgcggcggacgcagcggccctcgagcacgacaaggcctacgaccagcagctcaaagcgggtgacaatccgtacctgcggtataaccacgccgacgccgagtttcaggagcgtctgcaagaagatacgtcttttgggggcaacctcgggcgagcagtcttccaggccaagaagcgggttctcgaacctctcggtctggttgaggaaggcgctaagacggctcctggaaagaaacgtccggtagagcagtcgccacaagagccagactcctcctcgggcatcggcaagacaggccagcagcccgctaaaaaaagactcaattttggtcagactggcgactcagagtcagttccagaccctcaacctctcggagaacctccagcaacccccgctgctgtgggacctactacaatggcttcaggtggtggcgcaccaatggcagacaataacgagggcgccgacggagtgggtaattcctcgggaaattggcattgcgattccacatggatgggcgacagagtcatcaccaccagcacccgaacctgggccctgcccacctacaacaatcacctctacaagcaaatctccagtgcttcaacgggggccagcaacgacaaccactacttcggctacagcaccccctgggggtattttgacttcaacagattccactgccacttctcaccacgtgactggcagcgactcatcaacaacaactggggattccggcctaagcgactcaacttcaagctcttcaacattcaggtcaaagaggttacggacaacaatggagtcaagaccatcgccaataaccttaccagcacggtccaggtcttcacggactcggagtaccagttgccgtacgtcctcggctctgcgcaccagggctgcctccctccgttcccggcggacgtgttcatgattccgcagtacggctacctaacgctcaacaacggtagtcaggccgtgggacgctcctccttctactgcctggaatactttccttcgcagatgctgagaaccggcaacaacttccagtttacttacaccttcgaggacgtgcctttccacagcagctacgcccacagccagagcttggaccggctgatgaatcctctgattgaccagtacctgtactacttgtctcggactcaaacaacaggaggcacggcaaatacgcagactctgggcttcagccaaggtgggcctaatacaatggccaatcaggcaaagaactggctgccaggaccctgttaccgccaacaacgcgtctcgacgacaaccgggcaaaacaacaatagcaactttgcctggactgctgggaccaaataccatctgaatggaagaaattcattggctaatcctggcatcgctatggcaacacacaaagacgacaaggagcgtttttttcccagtaacgggatcctgatttttggcaaacaaaatgctgccagagacaatgcggattacagcgatgtcatgctcaccagcgaggaagaaatcaaaaccactaaccctgtggctacagaggaatacggtatcgtggcagataacttgcagcagcaaaacacggctcctcaaattggaactgtcaacagccagggggccttacccggtatggtttggcagaaccgggacgtgtacctgcagggtcccatctgggccaagattcctcacacggacggcaacttccacccgtctccgctgatgggcggctttggcctgaaacatcctccgcctcagatcctgatcaagaacacgcctgtacctgcggatcctccgaccaccttcaaccagtcaaagctgaactctttcatcacacagtactccacgggacaggtcagcgtggaaattgaatgggagctgcagaaggaaaacagcaagcgctggaacccggagatccagtacacttccaactactacaaatctacaaatgtggactttgctgttaacacagaaggcgtgtactctgaaccccaccccattggcacccgttacctcacccgtcccctgtaa

SEQ ID NO: 1103 - DNA, 2211 bp, Artificial Sequence
  source: /note="Description of Artificial Sequence: Synthetic polynucleotide"
atggctgccgatggttatcttccagattggctcgaggacaacctctctgagggcattcgcgagtggtgggacttgaaacctggagccccgaagcccaaagccaaccagcaaaagcaggacgacggccggggtctggtgcttcctggctacaagtacctcggacccttcaacggactcgacaagggggagcccgtcaacgcggcggacgcagcggccctcgagcacgacaaggcctacgaccagcagctcaaagcgggtgacaatccgtacctgcggtataaccacgccgacgccgagtttcaggagcgtctgcaagaagatacgtcttttgggggcaacctcgggcgagcagtcttccaggccaagaagcgggttctcgaacctctcggtctggttgaggaaggcgctaagacggctcctggaaagaaacgtccggtagagcagtcaccacaagagccagactcctcctcgggcatcggcaagacaggccagcagcccgctaaaaagagactcaattttggtcagactggcgactcagagtcagtccccgacccacaacctctcggagaacctccagcaacccccgctgctgtgggacctactacaatggcttcaggcggtggcgcaccaatggcggacaataacgaaggcgccgatggagtgggtaatgcctcaggaaattggcattgcgattccacatggctgggcgacagagtcatcaccaccagcacccgaacatgggccttgcccacctataacaaccacctctacaagcaaatctccagtgcttcaacgggggccagcaacgacaaccactacttcggctacagcaccccctgggggtattttgactttaacagattccactgccacttctcaccacgtgactggcagcgactcatcaacaacaactggggattccggcccaagagactcaacttcaagctcttcaacatccaggtcaaggaggtcacgcagaatgaaggcaccaagaccatcgccaataacctcaccagcaccatccaggtgtttacggactcggagtaccagctgccgtacgttctcggctctgcccaccagggctgcctgcctccgttcccggcggacgtgttcatgattccccagtacggctacctgactctgaacaatggcagtcaggccgtgggccgttcctccttctactgcctagagtactttccttctcaaatgctgagaacgggcaacaactttgagttcagctaccagtttgaggacgtgccttttcacagcagctacgcgcacagccaaagcctggaccggctgatgaatcctctgattgaccagtacctgtactacttgtctcggactcaaacaacaggaggcacggcaaatacgcagactctgggcttcagccaaggtgggcctaatacaatggccaatcaggcaaagaactggctgccaggaccctgttaccgccaacaacgcgtctcaacgacaaccgggcaaaacaacaatagcaactttgcctggactgctgggaccaaataccatatgaatggaagaaattcattggttaatcctggcatcgctatggcaacacacaaagacgacaaggagcgtttttttcccagtaacgggatcctgatttttggcaaacaaaatgttgccagagacaatgcggattacagcgatgtcatgctcaccagcgaggaagaaatcaaaaccactaaccctgtggctacagaggaatacggtattgtggcagataacttgcagcagcaaaacacggctcctcaaattggaactgtcaacagccagggggccttacccggtatggtctggcagaaccgggacgtgtacctgcagggtcccatctgggccaagattcctcacacggacggcaacttccacccgtcgccgctgatgggcggctttggcctgaaacatcctccgcctcagatcctgatcaagaacacgcctgtacctgcggatcctccgaccaccttcaaccagtcaaagctgaactctttcatcacgcaatacagcaccggacaggtcagcgtggaaattgaatgggagctgcagaaggaaaacagcaagcgctggaaccccgagatccagtacacctccaactactacaaatctacaagtgtggactttgctgttaatacagaaggcgtgtactctgaaccccaccccattggcacccgttacctcacccgtcccctgtaa

SEQ ID NO: 1104 - protein, 736 aa, Artificial Sequence
  source: /note="Description of Artificial Sequence: Synthetic polypeptide"
MAADGYLPDWLEDTLSEGIRQWWKLKPGPPPPKPAERHKDDSRGLVLPGYKYLGPFNGLDKGEPVNEADAAALEHDKAYDRQLDSGDNPYLKYNHADAEFQERLKEDTSFGGNLGRAVFQAKKRVLEPLGLVEEPVKTAPGKKRPVEQSPQEPDSSSGIGKKGQQPAKKRLNFGQTGDSESVPDPQPLGEPPATPAAVGPTTMASGGGAPMADNNEGADGVGNASGNWHCDSTWMGDRVITTSTRTWALPTYNNHLYKQISSASTGASNDNHYFGYSTPWGYFDFNRFHCHFSPRDWQRLINNNWGFRPKRLNFRLFNIQVKEVTDNNGVKTIANNLTSTVQVFTDSEYQLPYVLGSAHQGCLPPFPADVFMIPQYGYLTLNNGSQAVGRSSFYCLEYFPSQMLRTGNNFTFSYTFEEVPFHSSYAHSQSLDRLMNPLIDQYLYYLSRTQTTGGTANTQTLGFSQGGPNTMANQAKNWLPGPCYRQQRVSTTTGQNNNSNFAWTAGTKYHLNGRNSLANPGIAMATHKDDKERFFPSNGILIFGKQNAARDNADYSDVMLTSEEEIKTTNPVATEEYGIVADNLQQQNTAPQIGTVNSQGALPGMVWQNRDVYLQGPIWAKIPHTDGNFHPSPLMGGFGLKHPPPQILIKNTPVPADPPTTFNQSKLNSFITQYSTGQVSVEIEWELQKENSKRWNPEIQYTSNYYKSTSVDFAVNTEGVYSEPHPIGTRYLTRPL

SEQ ID NO: 1105 - protein, 736 aa, Artificial Sequence
  source: /note="Description of Artificial Sequence: Synthetic polypeptide"
MAADGYLPDWLEDNLSEGIREWWDLKPASPKPKANQQKQDDGRGLVLPGYKYLGPFNGLDKGEPVNAADAAALEHDKAYDQQLKAGDNPYLRYNHADAEFQERLQEDTSFGGNLGRAVFQAKKRLLEPLGLVEEAAKTAPGKKRPVEQSPQEPDSSAGIGKSGAQPAKKRLNFGQTGGTESVPDPQPLGEPPAAPSGVGPNTMAAGGGAPMADNNEGADGVGSSSGNWHCDSTWLGDRVITTSTRTWALPTYNNHLYKQISSASTGASNDNHYFGYSTPWGYFDFNRFHCHFSPRDWQRLINNNWGFRPKRLSFKLFNIQVKEVTQNEGTKTIANNLTSTIQVFTDSEYQLPYVLGSAHQGCLPPFPADVFMIPQYGYLTLNNGSQAVGRSSFYCLEYFPSQMLRTGNNFQFTYTFEDVPFHSSYAHSQSLDRLMNPLIDQYLYYLSRTQTTGGTANTQTLGFSQGGPNTMANQAKNWLPGPCYRQQRVSTTTGQNNNSNFAWTAGTKYHLNGRNSLANPGIAMATHKDDKERFFPSNGILIFGKQNAARDNADYSDVMLTSEEEIKTTNPVATEEYGIVADNLQQQNTAPQIGTVNSQGALPGMVWQNRDVYLQGPIWAKIPHTDGNFHPSPLMGGFGLKHPPPQILIKNTPVPADPPTTFNQSKLNSFITQYSTGQVSVEIEWELQKENSKRWNPEIQYTSNYYKSTSVDFAVNTEGVYSEPHPIGTRYLTRPL

SEQ ID NO: 1106 - protein, 736 aa, Artificial Sequence; identical to SEQ ID NO: 1045
  source: /note="Description of Artificial Sequence: Synthetic polypeptide"

SEQ ID NO: 1107 - protein, 736 aa, Artificial Sequence
  source: /note="Description of Artificial Sequence: Synthetic polypeptide"
MAADGYLPDWLEDNLSEGIREWWDLEPGAPKPKANQQKQDDGRGLVLPGYKYLGPFNGLDKGEPVNAADAAALEHDKAYDQQLKAGDNPYLRYNHADAEFQERLQEDTSFGGNLGRAVFQAKKRVLEPLGLVEEGAKTAPGKKRPVEQSPQEPDSSSGIGKTGQQPAKKRLNFGQTGDSESVPDPQPLGEPPATPAAVGPTTMASGGGAPMADNNEGADGVGNASGNWHCDSTWLGDRVITTSTRTWALPTYNNHLYKQISSASTGASNDNHYFGYSTPWGYFDFNRFHCHFSPRDWQRLINNNWGFRPKRLNFKLFNIQVKEVTDNNGVKTIANNLTSTVQVFTDSEYQLPYVLGSAHQGCLPPFPADVFMIPQYGYLTLNNGSQAVGRSSFYCLEYFPSQMLRTGNNFQFTYTFEDVPFHSSYAHSQSLDRLMNPLIDQYLYYLSRTQTTGGTANTQTLGFSQGGPNTMANQAKNWLPGPCYRQQRVSTTTGQNNNSNFAWTAGTKYHLNGRNSLANPGIAMATHKDDKERFFPSNGILIFGKQNAARDNADYSDVMLTSEEEIKTTNPVATEEYGIVADNLQQQNTAPQIGTVNSQGALPGMVWQNRDVYLQGPIWAKIPHTDGNFHPSPLMGGFGLKHPPPQILIKNTPVPADPPTTFNQSKLNSFITQYSTGQVSVEIEWELQKENSKRWNPEIQYTSNYYKSTSVDFAVNTEGVYSEPHPIGTRYLTRPL

SEQ ID NO: 1108 - protein, 736 aa, Artificial Sequence; identical to SEQ ID NO: 1045
  source: /note="Description of Artificial Sequence: Synthetic polypeptide"

SEQ ID NO: 1109 - protein, 736 aa, Artificial Sequence
  source: /note="Description of Artificial Sequence: Synthetic polypeptide"
MAADGYLPDWLEDTLSEGIRQWWKLKPGPPPPKPAERHKDDSRGLVLPGYKYLGPFNGLDKGEPVNEADAAALEHDKAYDRQLDSGDNPYLKYNHADAEFQERLKEDTSFGGNLGRAVFQAKKRVLEPLGLVEEPVKTAPGKKRPVEQSPQEPDSSSGIGKKGQQPAKKRLNFGQTGDSESVPDPQPLGEPPATPAAVGPTTMASGGGAPMADNNEGADGVGNASGNWHCDSTWLGDRVITTSTRTWALPTYNNHLYKQISSASTGASNDNHYFGYSTPWGYFDFNRFHCHFSPRDWQRLINNNWGFRPKRLNFKLFNIQVKEVTDNNGVKTIANNLTSTVQVFTDSDYQLPYVLGSAHQGCLPPFPADVFMIPQYGYLTLNNGSQAVGRSSFYCLEYFPSQMLRTGNNFQFTYTFEDVPFHSSYAHSQSLDRLMNPLIDQYLYYLSRTQTTGGTANTQTLGFSQGGPNTMANQAKNWLPGPCYRQQRVSTTTGQNNNSNFAWTAGTKYHLNGRNSLANPGIAMATHKDDKERFFPSNGILIFGKQNAARDNADYSDVMLTSEEEIKTTNPVATEEYGIVADNLQQQNTAPQIGTVNSQGALPGMVWQNRDVYLQGPIWAKIPHTDGNFHPSPLMGGFGLKHPPPQILIKNTPVPADPPTTFNQSKLNSFITQYSTGQVSVEIEWELQKENSKRWNPEIQYTSNYYKSTSVDFAVNTEGVYSEPHPIGTRYLTRPL

SEQ ID NO: 1110 - protein, 734 aa, Artificial Sequence
  source: /note="Description of Artificial Sequence: Synthetic polypeptide"
MAADGYLPDWLEDTLSEGIRQWWKLKPGPPPPKPAERHKDDSRGLVLPGYKYLGPFNGLDKGEPVNEADAAALEHDKAYDQQLQAGDNPYLRYNHADAEFQERLQGDTSFGGNLGRAVFQAKKRLLEPLGLVEEAAKTAPGKKRPVEQSPQEPDSSAGIGKSGAQPAKKRLNFGQTGDTESVPDPQPIGEPPAAPSGVGSLTMASGGGAPVADNNEGADGVGSSSGNWHCDSQWLGDRVITTSTRTWALPTYNNHLYKQISSASTGASNDNHYFGYSTPWGYFDFNRFHCHFSPRDWQRLINNNWGFRPKRLSFKLFNHPGQGGHAERHQDHRQPHQHIQVFTDSEYQLPYVLGSAHQGCLPPFPADVFMIPQYGYLTLNNGSQAVGRSSFYCLEYFPSQMLRTGNNFQFTYTFEDVPFHSSYAHSQSLDRLMNPLIDQYLYYLSRTQTTGGTANTQTLGFSQGGPNTMANQAKNWLPGPCYRQQRVSTTTGQNNNSNFAWTAGTKYHLNGRNSLGNPGIAMATHKDDKERFFPSNGILIFGKQNAARDNADYSDVMLTSEEEIKTTNPVATEEYGIVADNLQQQNTAPQIGTVNSQGALPGMVWQNRDVYLQGPIWAKIPHTDGNFHPSPLMGGFGLKHPPPQILIKNTPVPADPPTAFNQSKLNSFITQYSTGQVSVEIEWELQKENSKRWNPEIQYTSNYYKSTSVDFAVNTEGVYSEPHPIGTRYLTRPL

SEQ ID NO: 1111 - protein, 737 aa, Artificial Sequence
  source: /note="Description of Artificial Sequence: Synthetic polypeptide"
MAADGYLPDWLEDNLSEGIREWWDLKHGAPKPKANQQKQDDGRGLVLPGYKYLGPFNGLDKGEPVNAADAAALEHDKAYDQQLKAGDNPYLRYNHADAEFQERLQEDTSFGGNLGRAVFQAKKRVLEPFGLVEEGAKTAPGKKRPVEQSPQEPDSSSGIGKTGQQPAKKRLNFGQTGDSESVPDPQPLGEPPATPAAVGPTTMASGGGAPMADNNEGADGVGNASGNWHCDSTWLGDRVITTSTRTWALPTYNNHLYKQISNGTSGGSTNDNTYFGYSTPWGYFDFNRFHCHFSPRDWQRLINNNWGFRPKRLNFKLFNIQVKEVTQNEGTKTIANNLTSTIQVFTDSEYQLPYVLGSAHQGCLPPFPADVFMIPQYGYLTLNNGSQAVGRSSFYCLEYFPSQMLRTGNNFTFSYTFEDVPFHSSYAHSQSLDRLMNPLIDQYLYYLSRTQTTGGTANTQTLGFSQGGPNTMANQAKNWLPGPCYRQQRVSTTTGQNNNSNFAWTAGTKYHLNGRNSLANPGIAMATHKDDKERFFPSNGILIFGKQNAARDNADYSDVMLTSEEEIKTTNPVATEEYGIVADNLQQQNTAPQIGTVNSQGALPGMVWQNRDVYLQGPIWAKIPHTDGNFHPSPLMGGFGLKHPPPQILIKNTPVPADPPTTFNQSKLNSFITQYSTGQVSVEIEWELQKENSKRWNPEIQYTSNYYKSTSVDFAVNTEGVYSDPHPIGTRYLTRPL

SEQ ID NO: 1112 - protein, 737 aa, Artificial Sequence
  source: /note="Description of Artificial Sequence: Synthetic polypeptide"
MAADGYLPDWLEDNLSEGIREWWALKPGAPKPKANQQKQDDGRGLVLPGYKYLGPFNGLDKGEPVNEADAAALEHDKAYDQQLKAGDNPYLRYNHADAEFQERLQEDTSFGGNLGRAVFQAKKRVLEPLGLVEEGAKTAPGKKRPVEPSPQRSPDSSTGIGKKGQQPARKRLNFGQTGDSESVPDPQPLGEPPAAPSGVGPNTMASGGGAPMADNNEGADGVGNSSGNWHCDSTWMGDRVITTSTRTWALPTYNNHLYKQISSASTGASNDNHYFGYSTPWGYFDFNRFHCHFSPRDWQRLINNNWGFRPKRLNFKLFNIQVKEVTQNEGTKTIANNLTSTIQVFTDSEYQLPYVLGSAHQGCLPPFPADVFMIPQYGYLTLNNGSQAVGRSSFYCLEYFPSQMLRTGNNFQFTYTFEDVPFHSSYAHSQSLDRLMNPLIDQYLYYLSRTQTTGGTANTQTLGFSQGGPNTMANQAKNWLPGPCYRQQRVSTTTGQNNNSNFAWTAGTKYHLNGRNSLANPGIAMATHKDDKERFFPSNGILIFGKQNAARDNADYSDVMLTSEEEIKTTNPVATEEYGIVADNLQQQNTAPQIGTVNSQGALPGMVWQNRDVYLQGPIWAKIPHTDGNFHPSPLMGGFGLKHPPPQILIKNTPVPADPPTTFNQSKLNSFITQYSTGQVSVEIEWELQKENSKRWNPEIQYTSNYYKSTSVDFAVNTEGVYSEPHPIGTRYLTRPL

SEQ ID NO: 1113 - protein, 736 aa, Artificial Sequence
  source: /note="Description of Artificial Sequence: Synthetic polypeptide"
  MOD_RES (226)..(226): Any naturally occurring amino acid
MAADGYLPDWLEDTLSEGIRQWWKLKPGPPPPKPAERHKDDSRGLVLPGYKYLGPFNGLDKGEPVNEADAAALEHDKAYDRQLDSGDNPYLKYNHADAEFQERLKEDTSFGGNLGRAVFQAKKRVLEPLGLVEEPVKTAPGKKRPVEQSPQEPDSSSGIGKKGQQPAKKRLNFGQTGDSESVPDPQPLGEPPATPAAVGPTTMASGGGAPMADNNEGADGVGNASXNWHCDSTWLGDRVITTSTRTWALPPITTTSTSKSPVLQRGRSNDNHYFGYSTPWGYFDFNRFHCHFSPRDWQRLINNNWGFRPKRLNFKLFNIQVKEVTDNNGVKTIANNLTSTVQVFTDSDYQLPYVLGSAHQGCLPPFPADVFMIPQYGYLTLNNGSQAVGRSSFYCLEYFPSQMLRTGNNFQFTYTFEDVPFHSSYAHSQSLDRLMNPLIDQYLYYLSRTQTTGGTANTQTLGFSQGGPNTMANQAKNWLPGPCYRQQRVSTTTGQNNNSNFAWTAGTKYHLNGRNSLANPGIAMATHKDDKERFFPSNGILIFGKQNAARDNADYSDVMLTSEEEIKTTNPVATEEYGIVADNLQQQNTAPQIGTVNSQGALPGMVWQNRDVYLQGPIWAKIPHTDGNFHPSPLMGGFGLKHPPPQILIKNTPVPADPPTTFNQSKLNSFITQYSTGQVSVEIEWELQKENSKRWNPEIQYTSNYYKSTNVDFAVNTEGVYSEPHPIGTRYLTRPL

SEQ ID NO: 1114 - protein, 736 aa, Artificial Sequence
  source: /note="Description of Artificial Sequence: Synthetic polypeptide"
  MOD_RES (239)..(239): Any naturally occurring amino acid
MAADGYLPDWLEDNLSEGIREWWDLKPGAPKPKANQQKQDDGRGLVLPGYKYLGPFNGLDKGEPVNAADAAALEHDKAYDQQLQAGDNPYLRYNHADAEFQERLQGDTSFGGNLGRAVFQAKKRVLEPLGLVEEAAKTAPGKKRPVEQSPQEPDSSAGIGKSGAQPAKKRLNFGQTGDTESVPDPQPIGEPPAAPSGVGPNTMAAGGGAPMADNNEGADGVGSSSGNWHCDSTWLGDRXITTSTRTWALPTYNNHLYKQISSASTGASNDNHYFGYSTPWGYFDFNRFHCHFSPRDWQRLINNNWGFRPKRLNFKLFNIQVKEVTDNNGVKTIANNLTSTVQVFTDSEYQLPYVLGSAHQGCLPPFPADVFMIPQYGYLTLNNGSQAVGRSSFYCLEYFPSQMLRTGNNFTFSYTFEDVPFHSSYAHSQSLDRLMNPLIDQYLYYLSRTQTTGGTANTQTLGFSQGGPNTMANQAKNWLPGPCYRQQRVSTTTGQNNNSNFAWTAGTKYHLNGRNSLANPGIAMATHKDDKERFFPSNGILIFGKQNAARDNADYSDVMLTSEEEIKTTNPVATEEYGIVADNFQQQNTAPQIGTVNSQGALPGMVWQNRDVYLQGPIWAKIPHTDGNFHPSPLMGGFGLKHPPPQILIKNTPVPADPPTTFNQSKLNSFITQYSTGQVSVEIEWELQKENSKRWNPEIQYTSNYYKSTSVDFAVNTEGVYSEPHPIGTRYLTRPL

SEQ ID NO: 1115 - protein, 736 aa, Artificial Sequence
  source: /note="Description of Artificial Sequence: Synthetic polypeptide"
MAADGYLPDWLEDNLSEGIREWWALKPGAPKPKANQQKQDDGRGLVLPGYKYLGPFNGLDKGEPVNEADAAALEHDKAYDQQLKAGDNPYLKYNHADAEFQERLQEDTSFGGNLGRAVFQAKKRLLEPLGLVEEAAKTAPGKKRPVEQSPQEPDSSAGIGKSGAQPAKKRLNFGQTGDTESVPDPQPLGEPPATPAAVGPTTMASGGGAPMADNNEGADGVGNASGNWHCDSTWLGDRVITTSTRTWALPTYNNHLYKQISSASTGASNDNHYFGYSTPWGYFDFNRFHCHFSPRDWQRLINNNWGFRPKRLSFKLFNIQVKEVTQNEGTKTIANNLTSTIQVFTDSEYQLPYVLGSAHQGCLPPFPADVFMIPQYGYLTLNNGSQAVGRSSFYCLEYFPSQMLRTGNNFQFTYTFEDVPFHSSYAHSQSLDRLMNPLIDQYLYYLSRTQTTGGTANTQTLGFSQGGPNTMANQAKNWLPGPCYRQQRVSTTTGQNNNSNFAWTAGTKYHLNGRNSLANPGIAMATHKDDKERFFPSNGILIFGKQNAARDNADYSDVMLTSEEEIKTTNPVATEEYGIVADNLQQQNTAPQIGTVNSQGALPGMVWQNRDVYLQGPIWAKIPHTDGNFHPSPLMGGFGLKHPPPQILIKNTPVPADPPTTFNQSKLNSFITQYSTGQVSVEIEWELQKENSKRWNPEIQYTSNYYKSTSVDFAVNTEGVYSEPHPIGTRYLTRPL

SEQ ID NO: 1116 - protein, 736 aa, Artificial Sequence
  source: /note="Description of Artificial Sequence: Synthetic polypeptide"
MAADGYLPDWLEDTLSEGIRQWWKLKPGPPPPKPAERHKDDSRGLVLPGYKYLGPFNGLDKGEPVNEADAAALEHDKAYDQQLQAGDNPYLRYNHADAEFQERLQGDTSFGGNLGRAVFQAKKRLLEPLGLVEEAAKTAPGKKRPVEQSPQEPDSSAGIGKSGAQPAKKRLNFGQTGDTESVPDPQPIGEPPAAPSGVGSLTMASGGGAPVADNNEGADGVGSSSGNWHCDSQWLGDRVITTSTRTWALPTYNNHLYKQISSASTGASNDNHYFGYSTPWGYFDFNRFHCHFSPRDWQRLINNNWGFRPKRLSFKLFNIQVKEVTQNEGTKTIANNLTSTIQVFTDSEYQLPYVLGSAHQGCLPPFPADVFMIPQYGYLTLNNGSQAVGRSSFYCLEYFPSQMLRTGNNFQFTYTFEDVPFHSSYAHSQSLDRLMNPLIDQYLYYLSRTQTTGGTANTQTLGFSQGGPNTMANQAKNWLPGPCYRQQRVSTTTGQNNNSNFAWTAGTKYHLNGRNSLANPGIAMATHKDDKERFFPSNGILIFGKQNAARDNADYSDVMLTSEEEIKTTNPVATEEYGIVADNLQQQNTAPQIGTVNSQGALPGMVWQNRDVYLQGPIWAKIPHTDGNFHPSPLMGGFGLKHPPPQILIKNTPVPADPPTTFNQSKLNSFITQYSTGQVSVEIEWELQKENSKRWNPEIQYTSNYYKSTSVDFAVNTEGVYSEPHPIGTRYLTRPL

SEQ ID NO: 1117 - protein, 738 aa, Artificial Sequence
  source: /note="Description of Artificial Sequence: Synthetic polypeptide"
MAADGYLPDWLEDNLSEGIRQWWKLKPGPPPPKPAERHKDDSRGLVLPGYKYLGPFNGLDKGEPVNAADAAALEHDKAYDQQLKAGDNPYLRYNHADAEFQERLQEDTSFGGNLGRAVFQAKKRVLEPLGLVEEGAKTAPGKKRPVEPSPQRSPDSSTGIGKKGQQPAKKRLNFGQTGDSESVPDPQPLGEPPATPAAVGPTTMASGGGAPMADNNEGADGVGNASGNWHCDSTWLGDRVITTSTRTWALPTYNNHLYKQISNGTSGGSTNDNTYFGCVTPWGYFDFNKFHCHFSPDDWQRLINNGWGFRTKRLNFKLFSMKVKKGTDNTGIKTIANNLTNTVHVFADSEYQLPYVLGSAHQGCLPPFPADVFMIPQYGYLTLNNGSQAVGRSSFYCLEYFPSQMLRTGNNFTFSYTFEDVPFHSSYAHSQSLDRLMNPLIDQYLYYLSRTQTTGGTANTQTLGFSQGGPNTMANQAKNWLPGPCYRQQRVSTTTGQNNNSNFAWTAGTKYHLNGRNSLANPGIAMATHKDDKERFFPSNGILIFGKQNAARDNADYSDVMLTSEEEIKTTNPVATEEYGIVADNLQQQNTAPQIGTVNSQGALPGMVWQNRDVYLQGPIWAKIPHTDGNFHPSPLMGGFGLKHPPPQILIKNTPVPADPPTTFNQSKLNSFITQYSTGQVSVEIEWELQKENSKRWNPEIQYTSNYYKSTSVDFAVNTEGVYSEPHPIGTRYLTRPL

SEQ ID NO: 1118 - protein, 737 aa, Artificial Sequence
  source: /note="Description of Artificial Sequence: Synthetic polypeptide"
MAADGYLPDWLEDTLSEGIRQWWKLKPGPPPPKPAERHKDDSRGLVLPGYKYLGPFNGLDKGEPVNAADAAALEHDKAYDQQLKAGDNPYLRYNHADAEFQERLQEDTSFGGNLGRAVFQAKKRVLEPLGLVEEGAKTAPGKKRPVEPSPQRSPDSSTGIGKKGQQPAKKRLNFGQTGDSESVPDPQPIGEPPAGPSGLGSGTMAAGGGAPMADNNEGADGVGSSSGNWHCDSTWLGDRVITTSTRTWALPTYNNHLYKQISSASTGASNDNHYFGYSTPWGYFDFNRFHCHFSPRDWQRLINNNWGFRPKRLNFKLFNIQVKEVTDNNGVKTIANNLTSTVQVFTDSEYQLPYVLGSAHQGCLPPFPADVFMIPQYGYLTLNNGSQAVGRSSFYCLEYFPSQMLRTGNNFTFSYTFEDVPFHSSYAHSQSLDRLMNPLIDQYLYYLSRTQTTGGTANTQTLGFSQGGPNTMANQAKNWLPGPCYRQQRVSTTTGQNNNSNFAWTAGTKYHLNGRNSLANPGIAMATHKDDKERFFPSNGILIFGKQNAARDNADYSDVMLTSEEEIKTTNPVATEEYGIVADNLQQQNTAPQIGTVNSQGALPGMVWQNRDVYLQGPIWAKILHTDGNFHPSPLMGGFGMKHPPPPILIKNTPVPADPPTTFNQSKLNSFITQYSTGQVSVEIEWELPKENSKRWNPEIQYTSNYYKSTSVDFAVNTEGVYYEPHPIGTRYLTPPL

SEQ ID NO: 1119 - protein, 737 aa, Artificial Sequence
  source: /note="Description of Artificial Sequence: Synthetic polypeptide"
MAADGYLPDWLEDNLSEGIREWWALKPGAPKPKANQQKQDDGRGLVLPGYKYLGPFNGLDKGEPVNAADAAALEHDKAYDQQLKAGDNPYLRYNHADAEFQERLQEDTSFGGNLGRAVFQAKKRVLEPLGLVEEGAKTAPGKKRPVEPSPQRSPDSSTGIGKKGQQPARKRLNFGQTGDSESVPDPQPLGEPPAAPSGVAPNTMAAGGGAPMADNNEGADGVGNASGNWHCDSTWLGDRVITTSTRTWALPTYNNHLYKQISSASTGASNDNHYFGYSTPWGYFDFNRFHCHFSPRDWQRLITTIGGFRPKRLNFKLFNIQVKEVTDNNGVKTIANNLTSTVQVFTDSEYQLPYVLGSAHQGCLPPFPADVFMIPQYGYLTLNNGSQAVGRSSFYCLEYFPSQMLRTGNNFTFSYTFEDVPFHSSYAHSQSLDRLMNPLIDQYLYYLSRTQTTGGTANTQTLGFSQGGPNTMANQAKNWLPGPCYRQQRVSTTTGQNNNSNFAWTAGTKYHLNGRNSLANPGIAMATHKDDKERFFPSNGILIFGKQNAARDNADYSDVMLTSEEEIKTTNPVATEEYGIVADNLQQQNTAPQIGTVNSQGALPGMVWQNRDVYLQGPIWAKIPHTDGNFHPSPLMGGFGLKHPPPQILIKNTPVPADPPTTFNQSKLNSFITQYSTGQVSVEIEWELQKENSKRWNPEIQYTSNYYKSTSVDFAVNTEGVYSEPHPIGTRYLTRPL

SEQ ID NO: 1120 - protein, 736 aa, Artificial Sequence
  source: /note="Description of Artificial Sequence: Synthetic polypeptide"
MAADGYLPDWLEDTLSEGIRQWWKLKPGPPPPKPAERHKDDGRGLVLPGYKYLGPFNGLDKGEPVNAADAAALEHDKAYDQQLKAGDNPYLRYNHADAEFQERLQEDTSFGGNLGRAVFQAKKRVLEPLGLVEEPVKTAPGKKRPVEQSPQEPDSSSGIGKKGQQPAKKRLNFGQTGDSESVPDPQPLGEPPATPAAVGPTTMASGGGAPMADNNEGADGVGNASGNWHCDSTWMGDRVITTSTRTWALPTYNNHLYKQISSASTGASNDNHYFGYSTPWGYFDFNRFHCHFSPRDWQRLINNNWGFRPKRLNFKLFNIQVKEVTQNEGTKTIANNLTSTIQVFTDSEYQLPYVLGSAHQGCLPPFPADVFMIPQYGYLTLNNGSQAVGRSSFYCLEYFPSQMLRTGNNFQFTYTFEDVPFHSSYAHSQSLDRLMNPLIDQYLYYLSRTQTTGGTANTQTLGFSQGGPNTMANHAKNWLPGPCYRQQRVSTTTGQNNNSNFAWTAGTKYHLNGRNSLANPGIAMATHKDDKERFFPSNGILIFGKQNAARDNADYSDVMLTSEEEIKTTNPVATEEYGIVADNLQQQNTAPQIGTVNSQGALPGMVWQNRDVYLQGPIWAKIPHTDGNFHPSPLMGGFGLKHPPPQILIKNTPVPADPPTTFNQSKLNSFITQYSTGQVSVEIEWELQKENSKRWNPEIQYTSNYYKSTSVDFAVNTEGVYSEPHPIGTRYLTRPL

SEQ ID NO: 1121 - protein, 737 aa, Artificial Sequence
  source: /note="Description of Artificial Sequence: Synthetic polypeptide"
MAADGYLPDWLEDNLSQGIREWWDLKPGAPKPKANQQKQDDGRGLVLPGYKYLGPFNGLDKGEPVNAADAAALEHDKAYDQQLKAGDNPYLRYNHADAEFQERLQEDTSFGGNLGRAVFQAKKRVLEPLGLVEEGAKTAPGKKRPVEPSPQRSPDSSTGIGKKGQQPARKRLNFGQTGDSESVPDPQPLGEPPAAPAAVGPTTMASGGGAPMADNNEGADGVGSSSGNWHCDSQWLGDRVITTSTRTWALPTYNNHLYKQISSASTGASNDNHYFGYSTPWGYFDFNRFHCHFSPRDWQRLINNNWGFRPKRLSFKLFNIQVKEVTQNEGTKTIANNLTSTIQVFTDSEYQLPYVLGSAHQGCLPPFPADVFMIPQYGYLTLNNGSQAVGRSSFYCLEYFPSQMLRTGNNFQFTYTFEDVPFHSSYAHSQSLDRLMNPLIDQYLYYLSRTQTTGGTTNAQTLGFSQGGPNTMANQAKNWLPGPCYRQQRVSTTTGQNNNSNFAWTAGTKYHLNGRNSLANPGIAMATHKDDKERFFPSNGILIFGKQNAARDNADYSDVMLTSEEEIKTTNPVATEEYGIVADNLQQQNTAPQIGTVNSQGALPGMVWQNRDVYLQGPIWAKIPHTDGNFHPSPLMGGFGLKHPPPQILIKNTPVPADPPTTFNQSKLNSFITQYSTGQVSVEIEWELQKENSKRWNPEIQYTSNYYKSTNVDFAVNTEGVYSEPHPIGTRYLTRPL

SEQ ID NO: 1122 - protein, 736 aa, Artificial Sequence
  source: /note="Description of Artificial Sequence: Synthetic polypeptide"
MAADGYLPDWLEDNLSEGIREWWDLKPGAPKPKANQQKQDDGRGLVLPGYKYLGPFNGLDKGEPVNAADAAALEHDKAYDQQLKAGDNPYLRYNHADAEFQERLQEDTSFGGNLGRAVFQAKKRVLEPFGLVEEGAKTAPGKKRPVEQSPQEPDSSSGIGKTGQQPAKKRLNFGQTGDTESVPDPQPIGEPPAAPSGVGPNTMAAGGGAPMADNNEGADGVGSSSGNWHCDSTWMGDRVITTSTRTWALPTYNNHLYKQISSASTGASNDNHYFGYSTPWGYFDFNRFHCHFSPRDWQRLINNNWGFRPKRLNFKLFNIQVKEVTQNEGTKTIANNLTSTIQVFTDSEYQLPYVLGSAHQGCLPPFPADVFMIPQYGYLTLNNGSQAVGRSSFYCLEYFPSQMLRTGNNFQFTYTFEDVPFHSSYAHSQSLDRLMNPLIDQYLYYLSRTQTTGGTANTQTLGFSQGGPNTMANQAKNWLPGPCYRQQRVSTTTGQNNNSNFAWTAGTKYHLNGRNSLANPGIAMATHKDDKERFFPSNGILIFGKQNAARDNADYSDVMLTSEEEIKTTNPVATEEYGIVADNLQQQNTAPQIGTVNSQGALPGMVWQNRDVYLQGPIWAKIPHTDGNFHPSPLMGGFGLKHPPPQILIKNTPVPADPPTTFNQSKLNSFITQYSTGQVSVEIEWELQKENSKRWNPEIQYTSNYYKSTNVDFAVNTEGVYSEPHPIGTRYFTRPL

SEQ ID NO: 1123 - protein, 736 aa, Artificial Sequence
  source: /note="Description of Artificial Sequence: Synthetic polypeptide"
MAADGYLPDWLEDNLSEGIREWWDLKPGAPKPKANQQKQDDGRGLVLPGYKYLGPFNGLDKGEPVNAADAAALEHDKAYDQQLKAGDNPYLRYNHADAEFQERLQEDTSFGGNLGRAVFQAKKRVLEPLGLVEEGAKTAPGKKRPVEQSPQEPDSSSGIGKTGQQPAKKRLNFGQTGDSESVPDPQPLGEPPATPAAVGPTTMASGGGAPMADNNEGADGVGNSSGNWHCDSTWMGDRVITTSTRTWALPTYNNHLYKQISSASTGASNDNHYFGYSTPWGYFDFNRFHCHFSPRDWQRLINNNWGFRPKRLNFKLFNIQVKEVTDNNGVKTIANNLTSTVQVFTDSEYQLPYVLGSAHQGCLPPFPADVFMIPQYGYLTLNNGSQAVGRSSFYCLEYFPSQMLRTGNNFQFTYTFEDVPFHSSYAHSQSLDRLMNPLIDQYLYYLSRTQTTGGTANTQTLGFSQGGPNTMANQAKNWLPGPCYRQQRVSTTTGQNNNSNFAWTAGTKYHLNGRNSLANPGIAMATHKDDKERFFPSNGILIFGKQNAARDNADYSDVMLTSEEEIKTTNPVATEEYGIVADNLQQQNTAPQIGTVNSQGALPGMVWQNRDVYLQGPIWAKIPHTDGNFHPSPLMGGFGLKHPPPQILIKNTPVPADPPTTFNQSKLNSFITQYSTGQVSVEIEWELQKENSKRWNPEIQYTSNYYKSTNVDFAVNTEGVYSEPHPIGTRYLTRPL

SEQ ID NO: 1124 - protein, 736 aa, Artificial Sequence
  source: /note="Description of Artificial Sequence: Synthetic polypeptide"
MAADGYLPDWLEDNLSEGIREWWDLKPGAPKPKANQQKQDDGRGLVLPGYKYLGPFNGLDKGEPVNAADAAALEHDKAYDQQLKAGDNPYLRYNHADAEFQERLQEDTSFGGNLGRAVFQAKKRVLEPLGLVEEGAKTAPGKKRPVEQSPQEPDSSSGIGKTGQQPAKKRLNFGQTGDSESVPDPQPLGEPPATPAAVGPTTMASGGGAPMADNNEGADGVGNASGNWHCDSTWLGDRVITTSTRTWALPTYNNHLYKQISSASTGASNDNHYFGYSTPWGYFDFNRFHCHFSPRDWQRLINNNWGFRPKRLNFKLFNIQVKEVTQNEGTKTIANNLTSTIQVFTDSEYQLPYVLGSAHQGCLPPFPADVFMIPQYGYLTLNNGSQAVGRSSFYCLEYFPSQMLRTGNNFEFSYQFEDVPFHSSYAHSQSLDRLMNPLIDQYLYYLSRTQTTGGTANTQTLGFSQGGPNTMANQAKNWLPGPCYRQQRVSTTTGQNNNSNFAWTAGTKYHMNGRNSLVNPGIAMATHKDDKERFFPSNGILIFGKQNVARDNADYSDVMLTSEEEIKTTNPVATEEYGIVADNLQQQNTAPQIGTVNSQGALPGMVWQNRDVYLQGPIWAKIPHTDGNFHPSPLMGGFGLKHPPPQILIKNTPVPADPPTTFNQSKLNSFITQYSTGQVSVEIEWELQKENSKRWNPEIQYTSNYYKSTSVDFAVNTEGVYSEPHPIGTRYLTRPL

SEQ ID NO: 1125 - DNA, 2217 bp, Artificial Sequence
  source: /note="Description of Artificial Sequence: Synthetic polynucleotide"
atggctgccgatggttatcttccagattggctcgaggacaacctctctgagggcattcgcgagtggtgggcgctgaaacctggagccccgaagcccaaagccaaccagcaaaagcaggacgacggccggggtctggtgcttcctggctacaagtacctcggacccttcaacggactcgacaagggggagcccgtcaacgcggcggacgcagcggccctcgagcacgacaaggcctacgaccagcagctgcaggcgggtgacaatccgtacctgcggtataaccacgccgacgccgagtttcaggagcgtctgcaagaagatacgtcttttgggggcaacctcgggcgagcagtcttccaggccaagaagcgggttctcgaacctctcggtctggttgaggaaggcgctaagacggctcctggaaagaagagaccggtagagccatcaccccagcgttctccagactcctctacgggcatcggcaagaaaggccaacagcccgccagaaaaagactcaattttggtcagactggcgactcagagtcagttccagaccctcaacctctcggagaacctccagcagcgccctctggtgtgggacctaatacaatggctgcaggcggtggcgcaccaatggcagacaataacgaaggcgccgacggagtgggtagttcctcgggaaattggcattgcgattccacatggctgggcgacagagtcatcaccaccagcacccgaacctgggccctgcccacctacaacaaccacctctacaagcaaatctccaacgggacatcgggaggagccaccaacgacaacacctacttcggctacagcaccccctgggggtattttgactttaacagattccactgccacttttcaccacgtgactggcagcgactcatcaacaacaactggggattccggcccaagagactcagcttcaagctcttcaacatccaggtcaaggaggtcacgcagaatgaaggcaccaagaccatcgccaataacctcaccagcaccatccaggtgtttacggactcggagtaccagctgccgtacgttctcggctctgcccaccagggctgcctgcctccgttcccggcggacgtgttcatgattccccagtacggctacctaacactcaacaacggtagtcaggccgtgggacgctcctccttctactgcctggaatactttccttcgcagatgctgagaaccggcaacaacttccagtttacttacaccttcgaggacgtgcctttccacagcagctacgcccacagccagagcttggaccggctgatgaatcctctgattgaccagtacctgtactacttgtctcggactcaaacaacaggaggcacggcaaatacgcagactctgggcttcagccaaggtgggcctaatacaatggccaatcaggcaaagaactggctgccaggaccctgttaccgccaacaacgcgtctcaacgacaaccgggcaaaacaacaatagcaactttgcctggactgctgggaccaaataccatctgaatggaagaaattcattggctaatcctggcatcgctatggcaacacacaaagacgacgaggagcgtttttttcccagtaacgggatcctgatttttggcaaacaaaatgctgccagagacaatgcggattacagcgatgtcatgctcaccagcgaggaagaaatcaaaaccactaaccctgtggctacagaggaatacggtatcgtggcagataacttgcagcagcaaaacacggctcctcaaattggaactgtcaacagccagggggccttacccggtatggtttggcagaaccgggacgtgtacctgcagggtcccatctgggccaagattcctcacacggacggcaacttccacccgtctccgctgatgggcggctttggcctgaaacatcctccgcctcagatcctgatcaagaacacgcctgtacctgcggatcctccgaccaccttcaaccagtcaaagctgaactctttcatcacgcaatacagcaccggacaggtcagcgtggaaattgaatgggagctgcagaaggaaaacagcaagcgctggaaccccgagatccagtacacctccaactactacaaatctacaagtgtggactttgctgttaatacagaaggcgtgtactctgaaccccgccccattggcacccgttacctcacccgtaatctgtaa

SEQ ID NO: 1126 - protein, 738 aa, Artificial Sequence; identical to SEQ ID NO: 116
  source: /note="Description of Artificial Sequence: Synthetic polypeptide"

SEQ ID NO: 1127 - protein, 735 aa, Artificial Sequence
  source: /note="Description of Artificial Sequence: Synthetic polypeptide"
MAADGYLPDWLEDNLSEGVREWWALQPGAPKPKANQQHQDNARGLVLPGYKYLGPGNGLDKGEPVNAADAAALEHDKAYDQQLKAGDNPYLKYNHADAEFQQRLQGDTSFGGNLGRAVFQAKKRVLEPLGLVEQAGETAPGKKRPLIESPQQPDSSTGIGKKGKQPAKKKLVFEDETGAGDGPPEGSTSGAMSDDSEMRAAAGGAAVEGGQGADGVGNASGDWHCDSTWSEGHVTTTSTRTWVLPTYNNHLYKRLGESLQSNTYNGFSTPWGYFDFNRFHCHFSPRDWQRLINNNWGMRPKAMRVKIFNIQVKEVTTSNGETTVANNLTSTVQIFADSSYELPYVMDAGQEGSLPPFPNDVFMVPQYGYCGLVTGNTSQQQTDRNAFYCLEYFPSQMLRTGNNFEITYSFEKVPFHSMYAHSQSLDRLMNPLIDQYLWGLQSTTTGTTLNAGTATTNFTKLRPTNFSNFKKNWLPGPSIKQQGFSKTANQNYKIPATGSDSLIKYETHSTLDGRWSALTPGPPMATAGPADSKFSNSQLIFAGPKQNGNTATVPGTLIFTSEEELAATNATDTDMWGNLPGGDQSNSNLPTVDRLTALGAVPGMVWQNRDIYYQGPIWAKIPHTDGHFHPSPLIGGFGLKHPPPQIFIKNTPVPANPATTFSSTPVNSFITQYSTGQVSVQIDWEIQKERSKRWNPEVQFTSNYGQQNSLLWAPDAAGKYTEPRAIGTRYLTHHL

SEQ ID NO: 1128 - protein, 735 aa, Artificial Sequence
  source: /note="Description of Artificial Sequence: Synthetic polypeptide"
MAADGYLPDWLEDNLSEGVREWWALQPGAPKPKANQQHQDNARGLVLPGYKYLGPGNGLDKGEPVNAADAAALEHDKAYDQQLKAGDNPYLKYNHADAEFQQRLQGDTSFGGNLGRAVFQAKKRVLEPLGLVEQAGETAPGKKRPLIESPQQPDSSTGIGKKGKQPAKKKLVFEDETGAGDGPPEGSTSGAMSDDSEMRAAAGGAAVEGGQGADGVGNASGDWHCDSTWSEGHVTTTSTRTWVLPTYNNHLYKRLGESLQSNTYNGFSTPWGYFDFNRFHCHFSPRDWQRLINNNWGMRPKAMRVKIFNIQVKEVTTSNGETTVANNLTSTVQIFADSSYELPYVMDAGQEGSLPPFPNDVFMVPQYGYCGLVTGNTSQQQTDRNAFYCLEYFPSQMLRTGNNFEITYSFEKVPFHSMYAHSQSLDRLMNPLIDQYLWGLQSTTTGTTLNAGTATTNFTKLRPTNFSNFKKNWLPGPSIKQQGFSKTANQNYLIPATGSDSLIRYETHSTLDGRWSALTPGPPMATAGPADSKFSNSQLIFAGPKQNGNTATVPGTLIFTSEEELAATNATDTDMWGNLPFRDLSSSNLPTVDRSTPLGAVPGMVWQNRDIYYQGPIWAKIPHTDGHFHPSPLIGGFGLKHPPPQIFIKNTPVPANPATTFSSTPVNSFITQYSTGQVSVQIDWEIQKERSKRWNPEVQFTSNYGQQNSLLWAPDAAGKYTEPRAIGTRYLTHHL

SEQ ID NO: 1129 - protein, 735 aa, Artificial Sequence
  source: /note="Description of Artificial Sequence: Synthetic polypeptide"
MAADGYLPDWLEDNLSEGVREWWALQPGAPKPKANQQHQDNARGLVLPGYKYLGPGNGLDKGEPVNAADAAALEHDKAYDQQLKAGDNPYLKYNHADAEFQQRLQGDTSFGGNLGRAVFQAKKRVLEPLGLVEQAGETAPGKKRPLIESPQQPDSSTGIGKKGKQPAKKKLVFEDETGAGDGPPEGSTSGAMSDDSEMRAAAGGAAVEGGQGADGVGNASGDWHCDSTWSEGHVTTTSTRTWVLPTYNNHLYKRLGESLQSNTYNGFSTPWGYFDFNRFHCHFSPRDWQRLINNNWGMRPKAMRVKIFNIQVKEVTTSNGETTVANNLTSTVQIFADSSYELPYVMDAGQEGSLPPFPNDVFMVPQYGYCGLVTGNTSQQQTDRNAFYCLEYFPSQMLRTGNNFEITYSFEKVPFHSMYAHSQSLDRLMNPLIDQYLWGLQSTTTGTTLNAGTATTNFTKLRPTNFSNFKKNWLPGPSIKQQGFSKTANQNYYIPATGSDSLILYETHSTLDGRWSALTPGPPMATAGPADSKFSNSQLIFAGPKQNGNTATVPGTLIFTSEEELAATNATDTDMWGNLPGGDQSNSNLPTVDRLTALGAVPGMVWQNRDIYYQGPIWAKIPHTDGHFHPSPLIGGFGLKHPPPQIFIKNTPVPANPATTFSSTPVNSFITQYSTGQVSVQIDWEIQKERSKRWNPEVQFTSNYGQQNSLLWAPDAAGKYTEPRAIGTRYLTHHL

SEQ ID NO: 1130 - protein, 735 aa, Artificial Sequence
  source: /note="Description of Artificial Sequence: Synthetic polypeptide"
MAADGYLPDWLEDNLSEGVREWWALQPGAPKPKANQQHQDNARGLVLPGYKYLGPGNGLDKGEPVNAADAAALEHDKAYDQQLKAGDNPYLKYNHADAEFQQRLQGDTSFGGNLGRAVFQAKKRVLEPLGLVEQAGETAPGKKRPLIESPQQPDSSTGIGKKGKQPAKKKLVFEDETGAGDGPPEGSTSGAMSDDSEMRAAAGGAAVEGGQGADGVGNASGDWHCDSTWSEGHVTTTSTRTWVLPTYNNHLYKRLGESLQSNTYNGFSTPWGYFDFNRFHCHFSPRDWQRLINNNWGMRPKAMRVKIFNIQVKEVTTSNGETTVANNLTSTVQIFADSSYELPYVMDAGQEGSLPPFPNDVFMVPQYGYCGLVTGNTSQQQTDRNAFYCLEYFPSQMLRTGNNFEITYSFEKVPFHSMYAHSQSLDRLMNPLIDQYLWGLQSTTTGTTLNAGTATTNFTKLRPTNFSNFKKNWLPGPSIKQQGFSKTANQNYGIPATGSDSLIKYETHSTLDGRWSALTPGPPIATAGPADSKFSNSQLIFAGPKQNGNTATVPGTLIFTSEEELAATNATDTDMWGNLPLYDASSSNLPTVDRLTLLGAVPGMVWQNRDIYYQGPIWAKIPHTDGHFHPSPLIGGFGLKHPPPQIFIKNTPVPANPATTFSSTPVNSFITQYSTGQVSVQIDWEIQKERSKRWNPEVQFTSNYGQQNSLLWAPDAAGKYTEPRAIGTRYLTHHL

SEQ ID NO: 1131 - protein, 735 aa, Artificial Sequence
  source: /note="Description of Artificial Sequence: Synthetic polypeptide"
MAADGYLPDWLEDNLSEGVREWWALQPGAPKPKANQQHQDNARGLVLPGYKYLGPGNGLDKGEPVNAADAAALEHDKAYDQQLKAGDNPYLKYNHADAEFQQRLQGDTSFGGNLGRAVFQAKKRVLEPLGLVEQAGETAPGKKRPLIESPQQPDSSTGIGKKGKQPAKKKLVFEDETGAGDGPPEGSTSGAMSDDSEMRAAAGGAAVEGGQGADGVGNASGDWHCDSTWSEGHVTTTSTRTWVLPTYNNHLYKRLGESLQSNTYNGFSTPWGYFDFNRFHCHFSPRDWQRLINNNWGMRPKAMRVKIFNIQVKEVTTSNGETTVANNLTSTVQIFADSSYELPYVMDAGQEGSLPPFPNDVFMVPQYGYCGLVTGNTSQQQTDRNAFYCLEYFPSQMLRTGNNFEITYSFEKVPFHSMYAHSQSLDRLMNPLIDQYLWGLQSTTTGTTLNAGTATTNFTKLRPTNFSNFKKNWLPGPSIKQQGFSKTANQNYTIPATGSDSLITYETHSTLDGRWSALTPGPPGATAGPADSKFSNSQLIFAGPKQNGNTATVPGTLIFTSEEELAATNATDTDMWGNLPRVDTSASNLPTVDRYTNLGAVPGMVWQNRDIYYQGPIWAKIPHTDGHFHPSPLIGGFGLKHPPPQIFIKNTPVPANPATTFSSTPVNSFITQYSTGQVSVQIDWEIQKERSKRWNPEVQFTSNYGQQNSLLWAPDAAGKYTEPRAIGTRYLTHHL

SEQ ID NO: 1132 - protein, 735 aa, Artificial Sequence
  source: /note="Description of Artificial Sequence: Synthetic polypeptide"
MAADGYLPDWLEDNLSEGVREWWALQPGAPKPKANQQHQDNARGLVLPGYKYLGPGNGLDKGEPVNAADAAALEHDKAYDQQLKAGDNPYLKYNHADAEFQQRLQGDTSFGGNLGRAVFQAKKRVLEPLGLVEQAGETAPGKKRPLIESPQQPDSSTGIGKKGKQPAKKKLVFEDETGAGDGPPEGSTSGAMSDDSEMRAAAGGAAVEGGQGADGVGNASGDWHCDSTWSEGHVTTTSTRTWVLPTYNNHLYKRLGESLQSNTYNGFSTPWGYFDFNRFHCHFSPRDWQRLINNNWGMRPKAMRVKIFNIQVKEVTTSNGETTVANNLTSTVQIFADSSYELPYVMDAGQEGSLPPFPNDVFMVPQYGYCGLVTGNTSQQQTDRNAFYCLEYFPSQMLRTGNNFEITYSFEKVPFHSMYAHSQSLDRLMNPLIDQYLWGLQSTTTGTTLNAGTATTNFTKLRPTNFSNFKKNWLPGPSIKQQGFSKTANQNYSIPATGSDSLIKYETHSTLDGRWSALTPGPPFATAGPADSKFSNSQLIFAGPKQNGNTATVPGTLIFTSEEELAATNATDTDMWGNLPDYDSSLSNLPTVDRDTTLGAVPGMVWQNRDIYYQGPIWAKIPHTDGHFHPSPLIGGFGLKHPPPQIFIKNTPVPANPATTFSSTPVNSFITQYSTGQVSVQIDWEIQKERSKRWNPEVQFTSNYGQQNSLLWAPDAAGKYTEPRAIGTRYLTHHL

SEQ ID NO: 1133 - protein, 735 aa, Artificial Sequence
  source: /note="Description of Artificial Sequence: Synthetic polypeptide"
MAADGYLPDWLEDNLSEGVREWWALQPGAPKPKANQQHQDNARGLVLPGYKYLGPGNGLDKGEPVNAADAAALEHDKAYDQQLKAGDNPYLKYNHADAEFQQRLQGDTSFGGNLGRAVFQAKKRVLEPLGLVEQAGETAPGKKRPLIESPQQPDSSTGIGKKGKQPAKKKLVFEDETGAGDGPPEGSTSGAMSDDSEMRAAAGGAAVEGGQGADGVGNASGDWHCDSTWSEGHVTTTSTRTWVLPTYNNHLYKRLGESLQSNTYNGFSTPWGYFDFNRFHCHFSPRDWQRLINNNWGMRPKAMRVKIFNIQVKEVTTSNGETTVANNLTSTVQIFADSSYELPYVMDAGQEGSLPPFPNDVFMVPQYGYCGLVTGNTSQQQTDRNAFYCLEYFPSQMLRTGNNFEITYSFEKVPFHSMYAHSQSLDRLMNPLIDQYLWGLQSTTTGTTLNAGTATTNFTKLRPTNFSNFKKNWLPGPSIKQQGFSKTANQNYSIPATGSDSLIWYETHSTLDGRWSALTPGPPCATAGPADSKFSNSQLIFAGPKQNGNTATVPGTLIFTSEEELAATNATDTDMWGNLPQGDSSLSNLPTVDRMTVLGAVPGMVWQNRDIYYQGPIWAKIPHTDGHFHPSPLIGGFGLKHPPPQIFIKNTPVPANPATTFSSTPVNSFITQYSTGQVSVQIDWEIQKERSKRWNPEVQFTSNYGQQNSLLWAPDAAGKYTEPRAIGTRYLTHHL

SEQ ID NO: 1134 - protein, 735 aa, Artificial Sequence
  source: /note="Description of Artificial Sequence: Synthetic polypeptide"
MAADGYLPDWLEDNLSEGVREWWALQPGAPKPKANQQHQDNARGLVLPGYKYLGPGNGLDKGEPVNAADAAALEHDKAYDQQLKAGDNPYLKYNHADAEFQQRLQGDTSFGGNLGRAVFQAKKRVLEPLGLVEQAGETAPGKKRPLIESPQQPDSSTGIGKKGKQPAKKKLVFEDETGAGDGPPEGSTSGAMSDDSEMRAAAGGAAVEGGQGADGVGNASGDWHCDSTWSEGHVTTTSTRTWVLPTYNNHLYKRLGESLQSNTYNGFSTPWGYFDFNRFHCHFSPRDWQRLINNNWGMRPKAMRVKIFNIQVKEVTTSNGETTVANNLTSTVQIFADSSYELPYVMDAGQEGSLPPFPNDVFMVPQYGYCGLVTGNTSQQQTDRNAFYCLEYFPSQMLRTGNNFEITYSFEKVPFHSMYAHSQSLDRLMNPLIDQYLWGLQSTTTGTTLNAGTATTNFTKLRPTNFSNFKKNWLPGPSIKQQGFSKTANQNYCIPATGSDSLIRYETHSTLDGRWSALTPGPPLATAGPADSKFSNSQLIFAGPKQNGNTATVPGTLIFTSEEELAATNATDTDMWGNLPYKDSSRSNLPTVDRETSLGAVPGMVWQNRDIYYQGPIWAKIPHTDGHFHPSPLIGGFGLKHPPPQIFIKNTPVPANPATTFSSTPVNSFITQYSTGQVSVQIDWEIQKERSKRWNPEVQFTSNYGQQNSLLWAPDAAGKYTEPRAIGTRYLTHHL

SEQ ID NO: 1135 - protein, 735 aa, Artificial Sequence
  source: /note="Description of Artificial Sequence: Synthetic polypeptide"
MAADGYLPDWLEDNLSEGVREWWALQPGAPKPKANQQHQDNARGLVLPGYKYLGPGNGLDKGEPVNAADAAALEHDKAYDQQLKAGDNPYLKYNHADAEFQQRLQGDTSFGGNLGRAVFQAKKRVLEPLGLVEQAGETAPGKKRPLIESPQQPDSSTGIGKKGKQPAKKKLVFEDETGAGDGPPEGSTSGAMSDDSEMRAAAGGAAVEGGQGADGVGNASGDWHCDSTWSEGHVTTTSTRTWVLPTYNNHLYKRLGESLQSNTYNGFSTPWGYFDFNRFHCHFSPRDWQRLINNNWGMRPKAMRVKIFNIQVKEVTTSNGETTVANNLTSTVQIFADSSYELPYVMDAGQEGSLPPFPNDVFMVPQYGYCGLVTGNTSQQQTDRNAFYCLEYFPSQMLRTGNNFEITYSFEKVPFHSMYAHSQSLDRLMNPLIDQYLWGLQSTTTGTTLNAGTATTNFTKLRPTNFSNFKKNWLPGPSIKQQGFSKTANQNYIIPATGSDSLIYYETHSTLDGRWSALTPGPPRATAGPADSKFSNSQLIFAGPKQNGNTATVPGTLIFTSEEELAATNATDTDMWGNLPWIDNSRSNLPTVDRPTSLGAVPGMVWQNKNIYYQGPIWAKIPHTDGHFHPSPLIGGFGLKHPPPQIFIKNTPVPANPATTFTSTPVNSFITQYSTGQVSVQIDWEIQKERSKRWNPEVQFTSNYGQQNSLLWAPDAAGKYTEPRAIGTRYLTHHL

SEQ ID NO: 1136 - protein, 735 aa, Artificial Sequence
  source: /note="Description of Artificial Sequence: Synthetic polypeptide"
MAADGYLPDWLEDNLSEGVREWWALQPGAPKPKANQQHQDNARGLVLPGYKYLGPGNGLDKGEPVNAADAAALEHDKAYDQQLKAGDNPYLKYNHADAEFQQRLQGDTSFGGNLGRAVFQAKKRVLEPLGLVEQAGETAPGKKRPLIESPQQPDSSTGIGKKGKQPAKKKLVFEDETGAGDGPPEGSTSGAMSDDSEMRAAAGGAAVEGGQGADGVGNASGDWHCDSTWSEGHVTTTSTRTWVLPTYNNHLYKRLGESLQSNTYNGFSTPWGYFDFNRFHCHFSPRDWQRLINNNWGMRPKAMRVKIFNIQVKEVTTSNGETTVANNLTSTVQIFADSSYELPYVMDAGQEGSLPPFPNDVFMVPQYGYCGLVTGNTSQQQTDRNAFYCLEYFPSQMLRTGNNFEITYSFEKVPFHSMYAHSQSLDRLMNPLIDQYLWGLQSTTTGTTLNAGTATTNFTKLRPTNFSNFKKNWLPGPSIKQQGFSKTANQNYGIPATGSDSLIIYETHSTLDGRWSALTPGPPRATAGPADSKFSNSQLIFAGPKQNGNTATVPGTLIFTSEEELAATNATDTDMWGNLPGGDQSNSNLPTVDRLTALGAVPGMVWQNRDIYYQGPIWAKIPHTDGHFHPSPLIGGFGLKHPPPQIFIKNTPVPANPATTFSSTPVNSFITQYSTGQVSVQIDWEIQKERSKRWNPEVQFTSNYGQQNSLLWAPDAAGKYTEPRAIGTRYLTHHL

SEQ ID NO: 1137 - protein, 735 aa, Artificial Sequence
  source: /note="Description of Artificial Sequence: Synthetic polypeptide"
MAADGYLPDWLEDNLSEGVREWWALQPGAPKPKANQQHQDNARGLVLPGYKYLGPGNGLDKGEPVNAADAAALEHDKAYDQQLKAGDNPYLKYNHADAEFQQRLQGDTSFGGNLGRAVFQAKKRVLEPLGLVEQAGETAPGKKRPLIESPQQPDSSTGIGKKGKQPAKKKLVFEDETGAGDGPPEGSTSGAMSDDSEMRAAAGGAAVEGGQGADGVGNASGDWHCDSTWSEGHVTTTSTRTWVLPTYNNHLYKRLGESLQSNTYNGFSTPWGYFDFNRFHCHFSPRDWQRLINNNWGMRPKAMRVKIFNIQVKEVTTSNGETTVANNLTSTVQIFADSSYELPYVMDAGQEGSLPPFPNDVFMVPQYGYCGLVTGNTSQQQTDRNAFYCLEYFPSQMLRTGNNFEITYSFEKVPFHSMYAHSQSLDRLMNPLIDQYLWGLQSTTTGTTLNAGTATTNFTKLRPTNFSNFKKNWLPGPSIKQQGFSKTANQNYVIPATESDSLIYYETHSTLDGRWSALTPGPPYATAGPADSKFSNSQLIFAGPKQNGNTATVPGTLIFTSEEELAATNATDTDMWGNLPPRDDSTSNLPTVDRKTYLGAVPGMVWQNRDIYYQGPIWAKIPHTDGHFHPSPLIGGFGLKHPPPQIFIKNTPVPANPATTFSSTPVNSFITQYSTGQVSVQIDWEIQKERSKRWNPEVQFTSNYGQQNSLLWAPDAAGKYTEPRAIGTRYLTHHL

SEQ ID NO: 1138 - protein, 735 aa, Artificial Sequence
  source: /note="Description of Artificial Sequence: Synthetic polypeptide"
MAADGYLPDWLEDNLSEGVREWWALQPGAPKPKANQQHQDNARGLVLPGYKYLGPGNGLDKGEPVNAADAAALEHDKAYDQQLKAGDNPYLKYNHADAEFQQRLQGDTSFGGNLGRAVFQAKKRVLEPLGLVEQAGETAPGKKRPLIESPQQPDSSTGIGKKGKQPAKKKLVFEDETGAGDGPPEGSTSGAMSDDSEMRAAAGGAAVEGGQGADGVGNASGDWHCDSTWSEGHVTTTSTRTWVLPTYNNHLYKRLGESLQSNTYNGFSTPWGYFDFNRFHCHFSPRDWQRLINNNWGMRPKAMRVKIFNIQVKEVTTSNGETTVANNLTSTVQIFADSSYELPYVMDAGQEGSLPPFPNDVFMVPQYGYCGLVTGNTSQQQTDRNAFYCLEYFPSQMLRTGNNFEITYSFEKVPFHSMYAHSQSLDRLMNPLIDQYLWGLQSTTTGTTLNAGTATTNFTKLRPTNFSNFKKNWLPGPSIKQQGFSKTANQNYYIPATGSDSLIIYETHSTLDGRWSALTPGPPIATAGPADSKFSNSQLIFAGPKQNGNTATVPGTLIFTSEEELAATNSTDTDMWGNLPTDDDSRSNLPTVDRMTLLGAVPGMVWQNRDIYYQGPIWAKIPHTDGHFHPSPLIGGFGLKHPPPQIFIKNTPVPANPATTFSSTPVNSFITQYSTGQVSVQIDWEIQKERSKRWNPEVQFTSNYGQQNSLLWAPDAAGKYTEPRAIGTRYLTHHL

SEQ ID NO: 1139 - protein, 735 aa, Artificial Sequence
  source: /note="Description of Artificial Sequence: Synthetic polypeptide"
MAADGYLPDWLEDNLSEGVREWWALQPGAPKPKANQQHQDNARGLVLPGYKYLGPGNGLDKGEPVNAADAAALEHDKAYDQQLKAGDNPYLKYNHADAEFQQRLQGDTSFGGNLGRAVFQAKKRVLEPLGLVEQAGETAPGKKRPLIESPQQPDSSTGIGKKGKQPAKKKLVFEDETGAGDGPPEGSTSGAMSDDSEMRAAAGGAAVEGGQGADGVGNASGDWHCDSTWSEGHVTTTSTRTWVLPTYNNHLYKRLGESLQSNTYNGFSTPWGYFDFNRFHCHFSPRDWQRLINNNWGMRPKAMRVKIFNIQVKEVTTSNGETTVANNLTSTVQIFADSSYELPYVMDAGQEGSLPPFPNDVFMVPQYGYCGLVTGNTSQQQTDRNAFYCLEYFPSQMLRTGNNFEITYSFEKVPFHSMYAHSQSLDRLMNPLIDQYLWGLQSTTTGTTLNAGTATTNFTKLRPTNFSNFKKNWLPGPSIKQQGFSKTANQNYHIPATGSDSLIYYETHSTLDGRWSALTPGPPSATAGPADSKFSNSQLIFAGPKQNGNTATVPGTLIFTSEEELAATNATDTDMWGNLPRRDSSVSNLPTVDRYTDLGAVPGMVWQNRDIYYQGPIWAKIPHTDGHFHPSPLIGGFGLKHPPPQIFIKNTPVPANPATTFSSTPVNSFITQYSTGQVSVQIDWEIQKERSKRWNPEVQFTSNYGQQNSLLWAPDAAGKYTEPRAIGTRYLTHHL

SEQ ID NO: 1140 - protein, 735 aa, Artificial Sequence
  source: /note="Description of Artificial Sequence: Synthetic polypeptide"
MAADGYLPDWLEDNLSEGVREWWALQPGAPKPKANQQHQDNARGLVLPGYKYLGPGNGLDKGEPVNAADAAALEHDKAYDQQLKAGDNPYLKYNHADAEFQQRLQGDTSFGGNLGRAVFQAKKRVLEPLGLVEQAGETAPGKKRPLIESPQQPDSSTGIGKKGKQPAKKKLVFEDETGAGDGPPEGSTSGAMSDDSEMRAAAGGAAVEGGQGADGVGNASGDWHCDSTWSEGHVTTTSTRTWVLPTYNNHLYKRLGESLQSNTYNGFSTPWGYFDFNRFHCHFSPRDWQRLINNNWGMRPKAMRVKIFNIQVKEVTTSNGETTVANNLTSTVQIFADSSYELPYVMDAGQEGSLPPFPNDVFMVPQYGYCGLVTGNTSQQQTDRNAFYCLEYFPSQMLRTGNNFEITYSFEKVPFHSMYAHSQSLDRLMNPLIDQYLWGLQSTTTGTTLNAGTATTNFTKLRPTNFSNFKKNWLPGPSIKQQGFSKTANQNYSIPATGSDSLISYETHSTLDGRWSALTPGPPRATAGPADSKFSNSQLIFAGPKQNGNTATVPGTLIFTSEEELAATNATDTDMWGNLPRHDSSLSNLPTVDRNTGLGAVPGMVWQNRDIYYQGPIWAKIPHTDGHFHPSPLIGGFGLKHPPPQIFIKNTPVPANPATTFSSTPVNSFITQYSTGQVSVQIDWEIQKERSKRWNPEVQFTSNYGQQNSLLWAPDAAGKYTEPRAIGTRYLTHHL

SEQ ID NO: 1141 - protein, 735 aa, Artificial Sequence
  source: /note="Description of Artificial Sequence: Synthetic polypeptide"
MAADGYLPDWLEDNLSEGVREWWALQPGAPKPKANQQHQDNARGLVLPGYKYLGPGNGLDKGEPVNAADAAALEHDKAYDQQLKAGDNPYLKYNHADAEFQQRLQGDTSFGGNLGRAVFQAKKRVLEPLGLVEQAGETAPGKKRPLIESPQQPDSSTGIGKKGKQPAKKKLVFEDETGAGDGPPEGSTSGAMSDDSEMRAAAGGAAVEGGQGADGVGNASGDWHCDSTWSEGHVTTTSTRTWVLPTYNNHLYKRLGESLQSNTYNGFSTPWGYFDFNRFHCHFSPRDWQRLINNNWGMRPKAMRVKIFNIQVKEVTTSNGETTVANNLTSTVQIFADSSYELPYVMDAGQEGSLPPFPNDVFMVPQYGYCGLVTGNTSQQQTDRNAFYCLEYFPSQMLRTGNNFEITYSFEKVPFHSMYAHSQSLDRLMNPLIDQYLWGLQSTTTGTTLNAGTATTNFTKLRPTNFSNFKKNWLPGPSIKQQGFSKTANQNYFIPATGSDSLIRYETHSTLDGRWSALTPGPPLATAGPADSKFSNSQLIFAGPKQNGNTATVPGTLIFTSEEELAATNATDTDMWGNLPVIDFSKSNLPTVDRLTHLGAVPGMVWQNRDIYYQGPIWAKIPHTDGHFHPSPLIGGFGLKHPPPQIFIKNTPVPANPATTFSSTPVNSFITQYSTGQVSVQIDWEIQKERSKRWNPEVQFTSNYGQQNSLLWAPDAAGKYTEPRAIGTRYLTHHL

SEQ ID NO: 1142 - protein, 735 aa, Artificial Sequence
  source: /note="Description of Artificial Sequence: Synthetic polypeptide"
MAADGYLPDWLEDNLSEGVREWWALQPGAPKPKANQQHQDNARGLVLPGYKYLGPGNGLDKGEPVNAADAAALEHDKAYDQQLKAGDNPYLKYNHADAEFQQRLQGDTSFGGNLGRAVFQAKKRVLEPLGLVEQAGETAPGKKRPLIESPQQPDSSTGIGKKGKQPAKKKLVFEDETGAGDGPPEGSTSGAMSDDSEMRAAAGGAAVEGGQGADGVGNASGDWHCDSTWSEGHVTTTSTRTWVLPTYNNHLYKRLGESLQSNTYNGFSTPWGYFDFNRFHCHFSPRDWQRLINNNWGMRPKAMRVKIFNIQVKEVTTSNGETTVANNLTSTVQIFADSSYELPYVMDAGQEGSLPPFPNDVFMVPQYGYCGLVTGNTSQQQTDRNAFYCLEYFPSQMLRTGNNFEITYSFEKVPFHSMYAHSQSLDRLMNPLIDQYLWGLQSTTTGTTLNAGTATTNFTKLRPTNFSNFKKNWLPGPSIKQQGFSKTANQNYKIPATGSDSLIKYETHSTLDGRWSALTPGPPMATAGPADSKFSNSQLIFAGPKQNGNTATVPGTLIFTSEEELAATNATDTDMWGNLPVRDFSLSNLPTVDRTTKLGAVPGMVWQNRDIYYQGPIWAKIPHTDGHFHPSPLIGGFGLKHPPPQIFIKNTPVPANPATTFSSTPVNSFITQYSTGQVSVQIDWEIQKERSKRWNPEVQFTSNYGQQNSLLWAPDAAGKYTEPRAIGTRYLTHHL

SEQ ID NO: 1143 - protein, 735 aa, Artificial Sequence
  source: /note="Description of Artificial Sequence: Synthetic polypeptide"
MAADGYLPDWLEDNLSEGVREWWALQPGAPKPKANQQHQDNARGLVLPGYKYLGPGNGLDKGEPVNAADAAALEHDKAYDQQLKAGDNPYLKYNHADAEFQQRLQGDTSFGGNLGRAVFQAKKRVLEPLGLVEQAGETAPGKKRPLIESPQQPDSSTGIGKKGKQPAKKKLVFEDETGAGDGPPEGSTSGAMSDDSEMRAAAGGAAVEGGQGADGVGNASGDWHCDSTWSEGHVTTTSTRTWVLPTYNNHLYKRLGESLQSNTYNGFSTPWGYFDFNRFHCHFSPRDWQRLINNNWGMRPKAMRVKIFNIQVKEVTTSNGETTVANNLTSTVQIFADSSYELPYVMDAGQEGSLPPFPNDVFMVPQYGYCGLVTGNTSQQQTDRNAFYCLEYFPSQMLRTGNNFEITYSFEKVPFHSMYAHSQSLDRLMNPLIDQYLWGLQSTTTGTTLNAGTATTNFTKLRPTNFSNFKKNWLPGPSIKQQGFSKTANQNYFIPATGSDSLIQYETHSTLDGRWSALTPGPPMATAGPADSKFSNSQLIFAGPKQNGNTATVPGTLIFTSEEELAATNATDTDMWGNLPGGDQSNSNLPTVDRLTALGAVPGMVWQNRDIYYQGPIWAKIPHTDGHFHPSPLIGGFGLKHPPPQIFIKNTPVPANPATTFSSTPVNSFITQYSTGQVSVQIDWEIQKERSKRWNPEVQFTSNYGQQNSLLWAPDAAGKYTEPRAIGTRYLTHHL

SEQ ID NO: 1144 - protein, 735 aa, Artificial Sequence
  source: /note="Description of Artificial Sequence: Synthetic polypeptide"
MAADGYLPDWLEDNLSEGVREWWALQPGAPKPKANQQHQDNARGLVLPGYKYLGPGNGLDKGEPVNAADAAALEHDKAYDQQLKAGDNPYLKYNHADAEFQQRLQGDTSFGGNLGRAVFQAKKRVLEPLGLVEQAGETAPGKKRPLIESPQQPDSSTGIGKKGKQPAKKKLVFEDETGAGDGPPEGSTSGAMSDDSEMRAAAGGAAVEGGQGADGVGNASGDWHCDSTWSEGHVTTTSTRTWVLPTYNNHLYKRLGESLQSNTYNGFSTPWGYFDFNRFHCHFSPRDWQRLINNNWGMRPKAMRVKIFNIQVKEVTTSNGETTVANNLTSTVQIFADSSYELPYVMDAGQEGSLPPFPNDVFMVPQYGYCGLVTGNTSQQQTDRNAFYCLEYFPSQMLRTGNNFEITYSFEKVPFHSMYAHSQSLDRLMNPLIDQYLWGLQSTTTGTTLNAGTATTNFTKLRPTNFSNFKKNWLPGPSIKQQGFSKTANQNYEMPATGSDSLIIYETHSTLDGRWSALTPGPPFATAGPADSKFSNSQLIFAGPKQNGNTATVPGTLIFTSEEELAATNATDTDVWGNLPSGDHSQSNLPTVDRPTMLGAVPGMVWQNRDIYYQGPIWAKIPHTDGHFHPSPLIGGFGLKHPPPQIFIKNTPVPANPATTFISTPVNSFITQYSTGQVSVHIDWEIQKERSKRWNPEVQFTSDYGQHSSLLWAPDAAGKYTEPTAIGTRYLTHHL

SEQ ID NO: 1145 - protein, 734 aa, Artificial Sequence
  source: /note="Description of Artificial Sequence: Synthetic polypeptide"
MAADGYLPDWLEDNLSEGVREWWALQPGAPKPKANQQHQDNARGLVLPGYKYLGPGNGLDKGEPVNAADAAALEHDKAYDQQLKAGDNPYLKYNHADAEFQQRLQGDTSFGGNLGRAVFQAKKRVLEPLGLVEQAGETAPGKKRPLIESPQQPDSSTGIGKKGKQPAKKKLVFEDETGAGDGPPEGSTSGAMSDDSEMRAAAGGAAVEGGQGADGVGNASGDWHCDSTWSEGHVTTTSTRTWVLPTYNNHLYKRLGESLQSNTYNGFSTPWGYFDFNRFHCHFSPRDWQRLINNNWGMRPKAMRVKIFNIQVKEVTTSNGETTVANNLTSTVQIFADSSYELPYVMDAGQEGSLPPFPNDVFMVPQYGYCGLVTGNTSQQQTDRNAFYCLEYFPSQMLRTGNNFEITYSFEKVPFHSMYAHSQSLDRLMNPLIDQYLWGLQSTTTGTTLNAGTATTNFTKLRPTNFSNFKKNWLPGPSIKQQGFSKTANQNDIPATGSDSLIKYETHSTLDGRWSALTPGPPMATAGPADSKFSNSQLIFAGPKQNGNTATVPGTLIFTSEEELAATNATDTDMWGNLPGGDQSNSNLPTVDRLTALGAVPGMVWQNRDIYYQGPIWAKIPHTDGHFHPSPLIGGFGLKHPPPQIFIKNTPVPANPATTFSSTPVNSFITQYSTGQVSVQIDWEIQKERSKRWNPEVQFTSNYGQQNSLLWAPDAAGKYTEPRAIGTRYLTHHL

SEQ ID NO: 1146 - protein, 735 aa, Artificial Sequence
  source: /note="Description of Artificial Sequence: Synthetic polypeptide"
MAADGYLPDWLEDNLSEGVREWWALQPGAPKPKANQQHQDNARGLVLPGYKYLGPGNGLDKGEPVNAADAAALEHDKAYDQQLKAGDNPYLKYNHADAEFQQRLQGDTSFGGNLGRAVFQAKKRVLEPLGLVEQAGETAPGKKRPLIESPQQPDSSTGIGKKGKQPAKKKLVFEDETGAGDGPPEGSTSGAMSDDSEMRAAAGGAAVEGGQGADGVGNASGDWHCDSTWSEGHVTTTSTRTWVLPTYNNHLYKRLGESLQSNTYNGFSTPWGYFDFNRFHCHFSPRDWQRLINNNWGMRPKAMRVKIFNIQVKEVTTSNGETTVANNLTSTVQIFADSSYELPYVMDAGQEGSLPPFPNDVFMVPQYGYCGLVTGNTSQQQTDRNAFYCLEYFPSQMLRTGNNFEITYSFEKVPFHSMYAHSQSLDRLMNPLIDQYLWGLQSTTTGTTLNAGTATTNFTKLRPTNFSNFKKNWLPGPSIKQQGFSKTANQNYIIPATGSDSLITYETHSTLDGRWSALTPGPPVATAGPADSKFSNSQLIFAGPKQNGNTATVPGTLIFTSEEELAATNATDTDMWGNLPFNDDSSSNLPTVDRSTFLGAVPGMVWQNRDIYYQGPIWAKIPHTDGHFHPSPLIGGFGLKHPPPQIFIKNTPVPANPATTFSSTPVNSFITQYSTGQVSVQIDWEIQKERSKRWNPEVQFTSNYGQQNSLLWAPDAAGKYTEPRAIGTRYLTHHL

SEQ ID NO: 1147 - protein, 733 aa, Artificial Sequence
  source: /note="Description of Artificial Sequence: Synthetic polypeptide"
MAADGYLPDWLEDNLSEGIREWWDLKPGAPKPKANQQKQDDGRGLVLPGYKYLGPFNGLDKGEPVNAADAAALEHDKAYDQQLKAGDNPYLRYNHADAEFQERLQEDTSFGGNLGRAVFQAKKRVLEPLGLVEEGAKTAPGKKRPLESPQEPDSSSGIGKKGKQPARKRLNFEEDTGAGDGPPEGSDTSAMSSDIEMRAAPGGNAVDAGQGSDGVGNASGDWHCDSTWSEGKVTTTSTRTWVLPTYNNHLYLRLGTTSSSNTYNGFSTPWGYFDFNRFHCHFSPRDWQRLINNNWGLRPKAMRVKIFNIQVKEVTTSNGETTVANNLTSTVQIFADSSYELPYVMDAGQEGSLPPFPNDVFMVPQYGYCGIVTGENQNQTDRNAFYCLEYFPSQMLRTGNNFEMAYNFEKVPFHSMYAHSQSLDRLMNPLLDQYLWHLQSTTSGETLNQGNAATTFGKIRSGDFAFYRKNWLPGPCVKQQRFSKTASQNYKIPASGGNALLKYDTHYTLNNRWSNIAPGPPMATAGPSDGDFSNAQLIFPGPSVTGNTTTSANNLLFTSEEEIAATNPRDTDMFGQIADNNQNATTAPITGNVTAMGVLPGMVWQNRDIYYQGPIWAKIPHADGHFHPSPLIGGFGLKHPPPQIFIKNTPVPANPATTFTAARVDSFITQYSTGQVAVQIEWEIEKERSKRWNPEVQFTSNYGNQSSMLWAPDTTGKYTEPRVIGSRYLTNHL

SEQ ID NO: 1148 - protein, 742 aa, Artificial Sequence; identical to SEQ ID NO: 959
  source: /note="Description of Artificial Sequence: Synthetic polypeptide"

SEQ ID NO: 1149 - protein, 733 aa, Artificial Sequence; identical to SEQ ID NO: 432
  source: /note="Description of Artificial Sequence: Synthetic polypeptide"

SEQ ID NO: 1150 - protein, 733 aa, Artificial Sequence; identical to SEQ ID NO: 149
  source: /note="Description of Artificial Sequence: Synthetic polypeptide"

SEQ ID NO: 1151 - protein, 733 aa, Artificial Sequence; identical to SEQ ID NO: 436
  source: /note="Description of Artificial Sequence: Synthetic polypeptide"

SEQ ID NO: 1152 - protein, 735 aa, Artificial Sequence
  source: /note="Description of Artificial Sequence: Synthetic polypeptide"
MAADGYLPDWLEDNLSEGVREWWALQPGAPKPKANQQHQDNARGLVLPGYKYLGPGNGLDKGEPVNAADAAALEHDKAYDQQLKAGDNPYLKYNHADAEFQQRLQGDTSFGGNLGRAVFQAKKRVLEPLGLVEQAGETAPGKKRPLIESPQQPDSSTGIGKKGKQPAKKKLVFEDETGAGDGPPEGSTSGAMSDDSEMRAAAGGAAVEGGQGADGVGNASGDWHCDSTWSEGHVTTTSTRTWVLPTYNNHLYKRLGESLQSNTYNGFSTPWGYFDFNRFHCHFSPRDWQRLINNNWGMRPKAMRVKIFNIQVKEVTTSNGETTVANNLTSTVQIFADSSYELPYVMDAGQEGSLPPFPNDVFMVPQYGYCGLVTGNTSQQQTDRNAFYCLEYFPSQMLRTGNNFEITYSFEKVPFHSMYAHSQSLDRLMNPLIDQYLWGLQSTTTGTTLNAGTATTNFTKLRPTNFSNFKKNWLPGPSIKQQGFSKTANQNYEIPATGSDSLIEYETHSTLDGRWSALTPGPPMATAGPADSKFSNSQLIFAGPKQNGNTATVPGTLIFTSEEELAATNATDTDMWGNLPGGDQSSSNLPTVDRLTALGAVPGMVWQNRDIYYQGPIWAKIPHTDGHFHPSPLIGGFGLKHPPPQIFIKNTPVPANPATTFSSTPVNSFITQYSTGQVSVQIDWEIQKERSKRWNPEVQFTSNYGQQNSLLWAPDAAGKYTEPRAIGTRYLTHHL

SEQ ID NO: 1153 - protein, 735 aa, Artificial Sequence
  source: /note="Description of Artificial Sequence: Synthetic polypeptide"
MAADGYLPDWLEDNLSEGVREWWALQPGAPKPKANQQHQDNARGLVLPGYKYLGPGNGLDKGEPVNAADAAALEHDKAYDQQLKAGDNPYLKYNHADAEFQQRLQGDTSFGGNLGRAVFQAKKRVLEPLGLVEQAGETAPGKKRPLIESPQQPDSSTGIGKKGKQPAKKKLVFEDETGAGDGPPEGSTSGAMSDDSEMRAAAGGAAVEGGQGADGVGNASGDWHCDSTWSEGHVTTTSTRTWVLPTYNNHLYKRLGESLQSNTYNGFSTPWGYFDFNRFHCHFSPRDWQRLINNNWGMRPKAMRVKIFNIQVKEVTTSNGETTVANNLTSTVQIFADSSYELPYVMDAGQEGSLPPFPNDVFMVPQYGYCGLVTGNTSQQQTDRNAFYCLEYFPSQMLRTGNNFEITYSFEKVPFHSMYAHSQSLDRLMNPLIDQYLWGLQSTTTGTTLNAGTATTNFTKLRPTNFSNFKKNWLPGPSIKQQGFSKTANQNYEIPATGSDSLIEYETHSTLDGRWSALTPGPPMATAGPADSKFSNSQLIFAGPKQNGNTATVPGTLIFTSEEELAATNATDTDMWGNLPGGDQSSSNLPVVRGLRALGAVPGMVWQNRDIYYQGPIWAKIPHTDGHFHPSPLIGGFGLKHPPPQIFIKNTPVPANPATTFSSTPVNSFITQYSTGQVSVQIDWEIQKERSKRWNPEVQFTSNYGQQNSLLWAPDAAGKYTEPRAIGTRYLTHHL

SEQ ID NO: 1154 - protein, 735 aa, Artificial Sequence
  source: /note="Description of Artificial Sequence: Synthetic polypeptide"
MAADGYLPDWLEDNLSEGVREWWALQPGAPKPKANQQHQDNARGLVLPGYKYLGPGNGLDKGEPVNAADAAALEHDKAYDQQLKAGDNPYLKYNHADAEFQQRLQGDTSFGGNLGRAVFQAKKRVLEPLGLVEQAGETAPGKKRPLIESPQQPDSSTGIGKKGKQPAKKKLVFEDETGAGDGPPEGSTSGAMSDDSEMRAAAGGAAVEGGQGADGVGNASGDWHCDSTWSEGHVTTTSTRTWVLPTYNNHLYKRLGESLQSNTYNGFSTPWGYFDFNRFHCHFSPRDWQRLINNNWGMRPKAMRVKIFNIQVKEVTTSNGETTVANNLTSTVQIFADSSYELPYVMDAGQEGSLPPFPNDVFMVPQYGYCGLVTGNTSQQQTDRNAFYCLEYFPSQMLRTGNNFEITYSFEKVPFHSMYAHSQSLDRLMNPLIDQYLWGLQSTTTGTTLNAGTATTNFTKLRPTNFSNFKKNWLPGPSIKQQGFSKTANQNYEIPATGSDSLIEYETHSTLDGRWSALTPGPPMATAGPADSKFSNSQLIFAGPKQNGNTATVPGTLIFTSEEELAATNATDTDMWGNLPGGDQSSSNLPVVNRLSALGAVPGMVWQNRDIYYQGPIWAKIPHTDGHFHPSPLIGGFGLKHPPPQIFIKNTPVPANPATTFSSTPVNSFITQYSTGQVSVQIDWEIQKERSKRWNPEVQFTSNYGQQNSLLWAPDAAGKYTEPRAIGTRYLTHHL

SEQ ID NO: 1155 - protein, 735 aa, Artificial Sequence
  source: /note="Description of Artificial Sequence: Synthetic polypeptide"
MAADGYLPDWLEDNLSEGVREWWALQPGAPKPKANQQHQDNARGLVLPGYKYLGPGNGLDKGEPVNAADAAALEHDKAYDQQLKAGDNPYLKYNHADAEFQQRLQGDTSFGGNLGRAVFQAKKRVLEPLGLVEQAGETAPGKKRPLIESPQQPDSSTGIGKKGKQPAKKKLVFEDETGAGDGPPEGSTSGAMSDDSEMRAAAGGAAVEGGQGADGVGNASGDWHCDSTWSEGHVTTTSTRTWVLPTYNNHLYKRLGESLQSNTYNGFSTPWGYFDFNRFHCHFSPRDWQRLINNNWGMRPKAMRVKIFNIQVKEVTTSNGETTVANNLTSTVQIFADSSYELPYVMDAGQEGSLPPFPNDVFMVPQYGYCGLVTGNTSQQQTDRNAFYCLEYFPSQMLRTGNNFEITYSFEKVPFHSMYAHSQSLDRLMNPLIDQYLWGLQSTTTGTTLNAGTATTNFTKLRPTNFSNFKKNWLPGPSIKQQGFSKTANQNYEIPATGSDSLIEYETHSTLDGRWSALTPGPPMATAGPADSKFSNSQLIFAGPKQNGNTATVPGTLIFTSEEELAATNATDTDMWGNLPGGDQSSSNLPPVMGLGALGAVPGMVWQNRDIYYQGPIWAKIPHTDGHFHPSPLIGGFGLKHPPPQIFIKNTPVPANPATTFSSTPVNSFITQYSTGQVSVQIDWEIQKERSKRWNPEVQFTSNYGQQNSLLWAPDAAGKYTEPRAIGTRYLTHHL

SEQ ID NO: 1156 - protein, 736 aa, Artificial Sequence
  source: /note="Description of Artificial Sequence: Synthetic polypeptide"
MAADGYLPDWLEDNLSEGVREWWALQPGAPKPKANQQHQDNARGLVLPGYKYLGPGNGLDKGEPVNAADAAALEHDKAYDQQLKAGDNPYLKYNHADAEFQQRLQGDTSFGGNLGRAVFQAKKRVLEPLGLVEQAGETAPGKKRPLIESPQQPDSSTGIGKKGKQPAKKKLVFEDETGAGDGPPEGSTSGAMSDDSEMRAAAGGAAVEGGQGADGVGNASGDWHCDSTWSEGHVTTTSTRTWVLPTYNNHLYKRLGESLQSNTYNGFSTPWGYFDFNRFHCHFSPRDWQRLINNNWGMRPKAMRVKIFNIQVKEVTTSNGETTVANNLTSTVQIFADSSYELPYVMDAGQEGSLPPFPNDVFMVPQYGYCGLVTGNTSQQQTDRNAFYCLEYFPSQMLRTGNNFEITYSFEKVPFHSMYAHSQSLDRLMNPLIDQYLWGLQSTTTGTTLNAGTATTNFTKLRPTNFSNFKKNWLPGPSIKQQGFSKTANQNYEIPATGSDSLIEYETHSTLDGRWSALTPGPPMATAGPADSKFSNSQLIFAGPKQNGNTATVPGTLIFTSEEELAATNATDTDMWGNLPGGDQSRVDRLPTVDRLTALGAVPGMVWQNRDIYYQGPIWAKIPHTDGHFHPSPLIGGFGLKHPPPQIFIKNTPVPANPATTFSSTPVNSFITQYSTGQVSVQIDWEIQKERSKRWNPEVQFTSNYGQQNSLLWAPDAAGKYTEPRAIGTRYLTHHL

SEQ ID NO: 1157 - protein, 736 aa, Artificial Sequence
  source: /note="Description of Artificial Sequence: Synthetic polypeptide"
MAADGYLPDWLEDNLSEGVREWWALQPGAPKPKANQQHQDNARGLVLPGYKYLGPGNGLDKGEPVNAADAAALEHDKAYDQQLKAGDNPYLKYNHADAEFQQRLQGDTSFGGNLGRAVFQAKKRVLEPLGLVEQAGETAPGKKRPLIESPQQPDSSTGIGKKGKQPAKKKLVFEDETGAGDGPPEGSTSGAMSDDSEMRAAAGGAAVEGGQGADGVGNASGDWHCDSTWSEGHVTTTSTRTWVLPTYNNHLYKRLGESLQSNTYNGFSTPWGYFDFNRFHCHFSPRDWQRLINNNWGMRPKAMRVKIFNIQVKEVTTSNGETTVANNLTSTVQIFADSSYELPYVMDAGQEGSLPPFPNDVFMVPQYGYCGLVTGNTSQQQTDRNAFYCLEYFPSQMLRTGNNFEITYSFEKVPFHSMYAHSQSLDRLMNPLIDQYLWGLQSTTTGTTLNAGTATTNFTKLRPTNFSNFKKNWLPGPSIKQQGFSKTANQNYEIPATGSDSLIEYETHSTLDGRWSALTPGPPMATAGPADSKFSNSQLIFAGPKQNGNTATVPGTLIFTSEEELAATNATDTDMWGNLPGGDQSRALRLPTVDRLTALGAVPGMVWQNRDIYYQGPIWAKIPHTDGHFHPSPLIGGFGLKHPPPQIFIKNTPVPANPATTFSSTPVNSFITQYSTGQVSVQIDWEIQKERSKRWNPEVQFTSNYGQQNSLLWAPDAAGKYTEPRAIGTRYLTHHL

SEQ ID NO: 1158 - DNA, 1172 bp, Artificial Sequence
  source: /note="Description of Artificial Sequence: Synthetic polynucleotide"
cttaattaggctgcgcgctcgctcgctcactgaggccgcccgggcaaagcccgggcgtcgggcgacctttggtcgcccggcctcagtgagcgagcgagcgcgcagagagggagtggccaactccatcactaggggttccttgtagttaatgattaacccgccatgctacttatctaccagggtaatggggatcctctagaactatagctagtcgacattgattattgactagttattaatagtaatcaattacggggtcattagttcatagcccatatatggagttccgcgttacataacttacggtaaatggcccgcctggctgaccgcccaacgacccccgcccattgacgtcaataatgacgtatgttcccatagtaacgccaatagggactttccattgacgtcaatgggtggactatttacggtaaactgcccacttggcagtacatcaagtgtatcatatgccaagtacgccccctattgacgtcaatgacggtaaatggcccgcctggcattatgcccagtacatgaccttatgggactttcctacttggcagtacatctacgtattagtcatcgctattaccatgtcgaggccacgttctgcttcactctccccatctcccccccctccccacccccaattttgtatttatttattttttaattattttgtgcagcgatgggggcggggggggggggcgcgcgccaggcggggcggggcggggcgaggggcggggcggggcgaggcggagaggtgcggcggcagccaatcagagcggcgcgctccgaaagtttccttttatggcgaggcggcggcggcggcggccctataaaaagcgaagcgcgcggcgggcgggagcaagctttattgcggtagtttatcacagttaaattgctaacgcagtcagtgcttctgacacaacagtctcgaacttaagctgcagaagttggtcgtgaggcactgggcaggtaagtatcaaggttacaagacaggtttaaggagaccaatagaaactgggcttgtcgagacagagaagactcttgcgtttctgataggcacctattggtcttactgacatccactttgcctttctctccacaggtgtccactcccagttcaattacagctcttaaggctagagtacttaatacgactcsactatagg

SEQ ID NO: 1159 - DNA, 3231 bp, Artificial Sequence
  source: /note="Description of Artificial Sequence: Synthetic polynucleotide"
taagaattcacgcgtggtacctctagagtcgacccgggcggcctcgaggacggggtgaactacgcctgaggatccgatctttttccctctgccaaaaattatggggacatcatgaagccccttgagcatctgacttctggctaataaaggaaatttattttcattgcaatagtgtgttggaattttttgtgtctctcactcggaagcaattcgttgatctgaatttcgaccacccataatacccattaccctggtagataagtagcatggcgggttaatcattaactacaaggaacccctagtgatggagttggccactccctctctgcgcgctcgctcgctcactgaggccgggcgaccaaaggtcgcccgacgcccgggctttgcccgggcggcctcagtgagcgagcgagcgcgcagccttaattaacctaattcactggccgtcgttttacaacgtcgtgactgggaaaaccctggcgttacccaacttaatcgccttgcagcacatccccctttcgccagctggcgtaatagcgaagaggcccgcaccgatcgcccttcccaacagttgcgcagcctgaatggcgaatgggacgcgccctgtagcggcgcattaagcgcggcgggtgtggtggttacgcgcagcgtgaccgctacacttgccagcgccctagcgcccgctcctttcgctttcttcccttcctttctcgccacgttcgccggctttccccgtcaagctctaaatcgggggctccctttagggttccgatttagtgctttacggcacctcgaccccaaaaaacttgattagggtgatggttcacgtagtgggccatcgccctgatagacggtttttcgccctttgacgttggagtccacgttctttaatagtggactcttgttccaaactggaacaacactcaaccctatctcggtctattcttttgatttataagggattttgccgatttcggcctattggttaaaaaatgagctgatttaacaaaaatttaacgcgaattttaacaaaatattaacgcttacaatttaggtggcacttttcggggaaatgtgcgcggaacccctatttgtttatttttctaaatacattcaaatatgtatccgctcatgagacaataaccctgataaatgcttcaataatattgaaaaaggaagagtatgagtattcaacatttccgtgtcgcccttattcccttttttgcggcattttgccttcctgtttttgctcacccagaaacgctggtgaaagtaaaagatgctgaagatcagttgggtgcacgagtgggttacatcgaactggatctcaacagcggtaagatccttgagagttttcgccccgaagaacgttttccaatgatgagcacttttaaagttctgctatgtggcgcggtattatcccgtattgacgccgggcaagagcaactcggtcgccgcatacactattctcagaatgacttggttgagtactcaccagtcacagaaaagcatcttacggatggcatgacagtaagagaattatgcagtgctgccataaccatgagtgataacactgcggccaacttacttctgacaacgatcggaggaccgaaggagctaaccgcttttttgcacaacatgggggatcatgtaactcgccttgatcgttgggaaccggagctgaatgaagccataccaaacgacgagcgtgacaccacgatgcctgtagcaatggcaacaacgttgcgcaaactattaactggcgaactacttactctagcttcccggcaacaattaatagactggatggaggcggataaagttgcaggaccacttctgcgctcggcccttccggctggctggtttattgctgataaatctggagccggtgagcgtgggtctcgcggtatcattgcagcactggggccagatggtaagccctcccgtatcgtagttatctacacgacggggagtcaggcaactatggatgaacgaaatagacagatcgctgagataggtgcctcactgattaagcattggtaactgtcagaccaagtttactcatatatactttagattgatttaaaacttcatttttaatttaaaaggatctaggtgaagatcctttttgataatctcatgaccaaaatcccttaacgtgagttttcgttccactgagcgtcagaccccgtagaaaagatcaaaggatcttcttgagatcctttttttctgcgcgtaatctgctgcttgcaaacaaaaaaaccaccgctaccagcggtggtttgtttgccggatcaagagctaccaactctttttccgaaggtaactggcttcagcagagcgcagataccaaatactgttcttctagtgtagccgtagttaggccaccacttcaagaactctgtagcaccgcctacatacctcgctctgctaatcctgttaccagtggctgctgccagtggcgataagtcgtgtcttaccgggttggactcaagacgatagttaccggataaggcgcagcggtcgggctgaacggggggttcgtgcacacagcccagcttggagcgaacgacctacaccgaactgagatacctacagcgtgagctatgagaaagcgccacgcttcccgaagggagaaaggcggacaggtatccggtaagcggcagggtcggaacaggagagcgcacgagggagcttccagggggaaacgcctggtatctttatagtcctgtcgggtttcgccacctctgacttgagcgtcgatttttgtgatgctcgtcaggggggcggagcctatggaaaaacgccagcaacgcggcctttttacggttcctggccttttgctggccttttgctcacatgttctttcctgcgttatcccctgattctgtggataaccgtattaccgcctttgagtgagctgataccgctcgccgcagccgaacgaccgagcgcagcgagtcagtgagcgaggaagcggaagagcgcccaatacgcaaaccgcctctccccgcgcgttggccgattcattaatgcagctggcacgacaggtttcccgactggaaagcgggcagtgagcgcaacgcaattaatgtgagttagctcactcattaggcaccccaggctttacactttatgcttccggctcgtatgttgtgtggaattgtgagcggataacaatttcacacaggaaacagctatgaccatgattacgccagatttaattaaggc

SEQ ID NO: 1160 - protein, 737 aa, Artificial Sequence
  source: /note="Description of Artificial Sequence: Synthetic polypeptide"
  MOD_RES (264)..(264): Any amino acid
  MOD_RES (266)..(266): Any amino acid
  MOD_RES (268)..(268): Any amino acid
  MOD_RES (448)..(448): Any amino acid
  MOD_RES (459)..(460): Any amino acid
  MOD_RES (467)..(467): Any amino acid
  MOD_RES (470)..(471): Any amino acid
  MOD_RES (474)..(474): Any amino acid
  MOD_RES (495)..(495): Any amino acid
  MOD_RES (516)..(516): Any amino acid
  MOD_RES (533)..(533): Any amino acid
  MOD_RES (547)..(547): Any amino acid
  MOD_RES (551)..(551): Any amino acid
  MOD_RES (555)..(555): Any amino acid
  MOD_RES (557)..(557): Any amino acid
  MOD_RES (561)..(561): Any amino acid
  MOD_RES (563)..(563): Any amino acid
  MOD_RES (577)..(577): Any amino acid
  MOD_RES (583)..(583): Any amino acid
  MOD_RES (593)..(593): Any amino acid
  MOD_RES (596)..(596): Any amino acid
  MOD_RES (661)..(662): Any amino acid
  MOD_RES (664)..(665): Any amino acid
  MOD_RES (710)..(710): Any amino acid
  MOD_RES (717)..(719): Any amino acid
  MOD_RES (723)..(723): Any amino acid
MAADGYLPDWLEDNLSEGIREWWDLKPGAPKPKANQQKQDDGRGLVLPGYKYLGPFNGLDKGEPVNAADAAALEHDKAYDQQLKAGDNPYLRYNHADAEFQERLQEDTSFGGNLGRAVFQAKKRVLEPLGLVEEGAKTAPGKKRPVEPSPQRSPDSSTGIGKKGQQPAKKRLNFGQTGDSESVPDPQPLGEPPAGPSGLGSGTMAAGGGAPMADNNEGADGVGNASGNWHCDSTWLGDRVITTSTRTWALPTYNNHLYKQISSXSXGXTNDNHYFGYSTPWGYFDFNRFHCHFSPRDWQRLINNNWGFRPKRLNFKLFNIQVKEVTTNDGVTTIANNLTSTVQVFSDSEYQLPYVLGSAHQGCLPPFPADVFMIPQYGYLTLNNGSQAVGRSSFYCLEYFPSQMLRTGNNFTFSYTFEDVPFHSSYAHSQSLDRLMNPLIDQYLYYLXRTQSTGGTAGXXELLFSQXGPXXMSXQAKNWLPGPCYRQQRVSKTLXQNNNSNFAWTGATKYHLNGRXSLVNPGVAMATHKDDEXRFFPSSGVLIFGKXGAGXNNTXLXNVMXTXEEEIKTTNPVATEXYGVVAXNLQSSNTAPXTGXVNSQGALPGMVWQNRDVYLQGPIWAKIPHTDGNFHPSPLMGGFGLKHPPPQILIKNTPVPANPPXXFXXAKFASFITQYSTGQVSVEIEWELQKENSKRWNPEIQYTSNYAKSXNVDFAVXXXGVYXEPRPIGTRYLTRNL

SEQ ID NO: 1161 - protein, 737 aa, Artificial Sequence
  source: /note="Description of Artificial Sequence: Synthetic polypeptide"
MAADGYLPDWLEDNLSEGIREWWDLKPGAPKPKANQQKQDDGRGLVLPGYKYLGPFNGLDKGEPVNAADAAALEHDKAYDQQLKAGDNPYLRYNHADAEFQERLQEDTSFGGNLGRAVFQAKKRVLEPLGLVEEGAKTAPGKKRPVEPSPQRSPDSSTGIGKKGQQPAKKRLNFGQTGDSESVPDPQPLGEPPAGPSGLGSGTMAAGGGAPMADNNEGADGVGNASGNWHCDSTWLGDRVITTSTRTWALPTYNNHLYKQISSASSGSTNDNHYFGYSTPWGYFDFNRFHCHFSPRDWQRLINNNWGFRPKRLNFKLFNIQVKEVTTNDGVTTIANNLTSTVQVFSDSEYQLPYVLGSAHQGCLPPFPADVFMIPQYGYLTLNNGSQAVGRSSFYCLEYFPSQMLRTGNNFTFSYTFEDVPFHSSYAHSQSLDRLMNPLIDQYLYYLARTQSTGGTAGNRELLFSQGGPSNMSAQAKNWLPGPCYRQQRVSKTLAQNNNSNFAWTGATKYHLNGRDSLVNPGVAMATHKDDEDRFFPSSGVLIFGKEGAGANNTALENVMLTNEEEIKTTNPVATEQYGVVASNLQSSNTAPATGAVNSQGALPGMVWQNRDVYLQGPIWAKIPHTDGNFHPSPLMGGFGLKHPPPQILIKNTPVPANPPATFTPAKFASFITQYSTGQVSVEIEWELQKENSKRWNPEIQYTSNYAKSTNVDFAVNNEGVYSEPRPIGTRYLTRNL

SEQ ID NO: 1162 - protein, 737 aa, Artificial Sequence
  source: /note="Description of Artificial Sequence: Synthetic polypeptide"
MAADGYLPDWLEDNLSEGIREWWDLKPGAPKPKANQQKQDDGRGLVLPGYKYLGPFNGLDKGEPVNAADAAALEHDKAYDQQLKAGDNPYLRYNHADAEFQERLQEDTSFGGNLGRAVFQAKKRVLEPLGLVEEGAKTAPGKKRPVEPSPQRSPDSSTGIGKKGQQPAKKRLNFGQTGDSESVPDPQPLGEPPAGPSGLGSGTMAAGGGAPMADNNEGADGVGNASGNWHCDSTWLGDRVITTSTRTWALPTYNNHLYKQISSQSSGSTNDNHYFGYSTPWGYFDFNRFHCHFSPRDWQRLINNNWGFRPKRLNFKLFNIQVKEVTTNDGVTTIANNLTSTVQVFSDSEYQLPYVLGSAHQGCLPPFPADVFMIPQYGYLTLNNGSQAVGRSSFYCLEYFPSQMLRTGNNFTFSYTFEDVPFHSSYAHSQSLDRLMNPLIDQYLYYLSRTQSTGGTAGNRELLFSQGGPANMSAQAKNWLPGPCYRQQRVSKTLSQNNNSNFAWTGATKYHLNGRDSLVNPGVAMATHKDDEERFFPSSGVLIFGKQGAGANNTTLDNVMMTSEEEIKTTNPVATEQYGVVASNLQSSNTAPQTGTVNSQGALPGMVWQNRDVYLQGPIWAKIPHTDGNFHPSPLMGGFGLKHPPPQILIKNTPVPANPPAVFSPAKFASFITQYSTGQVSVEIEWELQKENSKRWNPEIQYTSNYAKSTNVDFAVNSEGVYSEPRPIGTRYLTRNL

SEQ ID NO: 1163 - protein, 737 aa, Artificial Sequence
  source: /note="Description of Artificial Sequence: Synthetic polypeptide"
MAADGYLPDWLEDNLSEGIREWWDLKPGAPKPKANQQKQDDGRGLVLPGYKYLGPFNGLDKGEPVNAADAAALEHDKAYDQQLKAGDNPYLRYNHADAEFQERLQEDTSFGGNLGRAVFQAKKRVLEPLGLVEEGAKTAPGKKRPVEPSPQRSPDSSTGIGKKGQQPAKKRLNFGQTGDSESVPDPQPLGEPPAGPSGLGSGTMAAGGGAPMADNNEGADGVGNASGNWHCDSTWLGDRVITTSTRTWALPTYNNHLYKQISSASSGSTNDNHYFGYSTPWGYFDFNRFHCHFSPRDWQRLINNNWGFRPKRLNFKLFNIQVKEVTTNDGVTTIANNLTSTVQVFSDSEYQLPYVLGSAHQGCLPPFPADVFMIPQYGYLTLNNGSQAVGRSSFYCLEYFPSQMLRTGNNFTFSYTFEDVPFHSSYAHSQSLDRLMNPLIDQYLYYLARTQSTGGTAGTRELLFSQGGPSNMSAQAKNWLPGPCYRQQRVSKTLTQNNNSNFAWTGATKYHLNGRDSLVNPGVAMATHKDDEDRFFPSSGVLIFGKQGAGANNTALDNVMITNEEEIKTTNPVATEQYGVVASNLQSSNTAPATGTVNSQGALPGMVWQNRDVYLQGPIWAKIPHTDGNFHPSPLMGGFGLKHPPPQILIKNTPVPANPPTVFSPAKFASFITQYSTGQVSVEIEWELQKENSKRWNPEIQYTSNYAKSTNVDFAVNSEGVYTEPRPIGTRYLTRNL

SEQ ID NO: 1164 - protein, 737 aa, Artificial Sequence
  source: /note="Description of Artificial Sequence: Synthetic polypeptide"
  MOD_RES (264)..(264): Any amino acid
  MOD_RES (448)..(448): Any amino acid
  MOD_RES (459)..(459): Any amino acid
  MOD_RES (470)..(470): Any amino acid
  MOD_RES (495)..(495): Any amino acid
  MOD_RES (533)..(533): Any amino acid
  MOD_RES (547)..(547): Any amino acid
  MOD_RES (555)..(555): Any amino acid
  MOD_RES (557)..(557): Any amino acid
  MOD_RES (561)..(561): Any amino acid
  MOD_RES (563)..(563): Any amino acid
  MOD_RES (593)..(593): Any amino acid
  MOD_RES (596)..(596): Any amino acid
  MOD_RES (661)..(662): Any amino acid
  MOD_RES (664)..(664): Any amino acid
  MOD_RES (718)..(718): Any amino acid
  MOD_RES (723)..(723): Any amino acid
MAADGYLPDWLEDNLSEGIREWWDLKPGAPKPKANQQKQDDGRGLVLPGYKYLGPFNGLDKGEPVNAADAAALEHDKAYDQQLKAGDNPYLRYNHADAEFQERLQEDTSFGGNLGRAVFQAKKRVLEPLGLVEEGAKTAPGKKRPVEPSPQRSPDSSTGIGKKGQQPAKKRLNFGQTGDSESVPDPQPLGEPPAGPSGLGSGTMAAGGGAPMADNNEGADGVGNASGNWHCDSTWLGDRVITTSTRTWALPTYNNHLYKQISSXSSGSTNDNHYFGYSTPWGYFDFNRFHCHFSPRDWQRLINNNWGFRPKRLNFKLFNIQVKEVTTNDGVTTIANNLTSTVQVFSDSEYQLPYVLGSAHQGCLPPFPADVFMIPQYGYLTLNNGSQAVGRSSFYCLEYFPSQMLRTGNNFTFSYTFEDVPFHSSYAHSQSLDRLMNPLIDQYLYYLXRTQSTGGTAGXRELLFSQGGPXNMSAQAKNWLPGPCYRQQRVSKTLXQNNNSNFAWTGATKYHLNGRDSLVNPGVAMATHKDDEXRFFPSSGVLIFGKXGAGANNTXLXNVMXTXEEEIKTTNPVATEQYGVVASNLQSSNTAPXTGXVNSQGALPGMVWQNRDVYLQGPIWAKIPHTDGNFHPSPLMGGFGLKHPPPQILIKNTPVPANPPXXFXPAKFASFITQYSTGQVSVEIEWELQKENSKRWNPEIQYTSNYAKSTNVDFAVNXEGVYXEPRPIGTRYLTRNL

SEQ ID NO: 1165 - protein, 737 aa, Artificial Sequence
  source: /note="Description of Artificial Sequence: Synthetic polypeptide"
  MOD_RES (264)..(264): Any amino acid
  MOD_RES (448)..(448): Any amino acid
  MOD_RES (470)..(470): Any amino acid
  MOD_RES (533)..(533): Any amino acid
  MOD_RES (547)..(547): Any amino acid
  MOD_RES (555)..(555): Any amino acid
  MOD_RES (557)..(557): Any amino acid
  MOD_RES (561)..(561): Any amino acid
  MOD_RES (563)..(563): Any amino acid
  MOD_RES (593)..(593): Any amino acid
  MOD_RES (596)..(596): Any amino acid
  MOD_RES (662)..(662): Any amino acid
  MOD_RES (664)..(664): Any amino acid
  MOD_RES (718)..(718): Any amino acid
MAADGYLPDWLEDNLSEGIREWWDLKPGAPKPKANQQKQDDGRGLVLPGYKYLGPFNGLDKGEPVNAADAAALEHDKAYDQQLKAGDNPYLRYNHADAEFQERLQEDTSFGGNLGRAVFQAKKRVLEPLGLVEEGAKTAPGKKRPVEPSPQRSPDSSTGIGKKGQQPAKKRLNFGQTGDSESVPDPQPLGEPPAGPSGLGSGTMAAGGGAPMADNNEGADGVGNASGNWHCDSTWLGDRVITTSTRTWALPTYNNHLYKQISSXSSGSTNDNHYFGYSTPWGYFDFNRFHCHFSPRDWQRLINNNWGFRPKRLNFKLFNIQVKEVTTNDGVTTIANNLTSTVQVFSDSEYQLPYVLGSAHQGCLPPFPADVFMIPQYGYLTLNNGSQAVGRSSFYCLEYFPSQMLRTGNNFTFSYTFEDVPFHSSYAHSQSLDRLMNPLIDQYLYYLXRTQSTGGTAGNRELLFSQGGPXNMSAQAKNWLPGPCYRQQRVSKTLSQNNNSNFAWTGATKYHLNGRDSLVNPGVAMATHKDDEXRFFPSSGVLIFGKXGAGANNTXLXNVMXTXEEEIKTTNPVATEQYGVVASNLQSSNTAPXTGXVNSQGALPGMVWQNRDVYLQGPIWAKIPHTDGNFHPSPLMGGFGLKHPPPQILIKNTPVPANPPAXFXPAKFASFITQYSTGQVSVEIEWELQKENSKRWNPEIQYTSNYAKSTNVDFAVNXEGVYSEPRPIGTRYLTRNL

SEQ ID NO: 1166 - DNA, 2217 bp, Artificial Sequence
  source: /note="Description of Artificial Sequence: Synthetic polynucleotide"
atggctgccgatggttatcttccagattggctcgaggacactctctctgaaggaataagacagtggtggaagctcaaacctggcccaccaccaccaaagcccgcagagcggcataaggacgacagcaggggtcttgtgcttcctgggtacaagtacctcggacccttcaacggactcgacaagggagagccggtcaacgaggcagacgccgcggccctcgagcacgacaaagcctacgaccggcagctcgacagcggagacaacccgtacctcaagtacaaccacgccgacgcggagtttcaggagcgccttaaagaagatacgtcttttgggggcaacctcggacgagcagtcttccaggcgaaaaagagggttcttgaacctctgggcctggttgaggaacctgttaagacggctccgggaaagaagagaccggtagagccatcaccccagcgttctccagactcctctacgggcatcggcaagaaaggccaacagcccgccagaaaaagactcaattttggtcagactggcgactcagagtcagttccagaccctcaacctctcggagaacctccagcagcgccctctggtgtgggacctaatacaatggctgcaggcggtggcgcaccaatggcagacaataacgaaggcgccgacggagtgggtagttcctcgggaaattggcattgcgattccacatggctgggcgacagagtcatcaccaccagcacccgaacctgggccctgcccacctacaacaaccacctctacaagcaaatctccaacgggacatcgggaggagccaccaacgacaacacctacttcggctacagcaccccctgggggtattttgactttaacagattccactgccacttttcaccacgtgactggcagcgactcatcaacaacaactggggattccggcccaagagactcagcttcaagctcttcaacatccaggtcaaggaggtcacgcagaatgaaggcaccaagaccatcgccaataacctcaccagcaccatccaggtgtttacggactcggagtaccagctgccgtacgttctcggctctgcccaccagggctgcctgcctccgttcccggcggacgtgttcatgattccccagtacggctacctaacactcaacaacggtagtcaggccgtgggacgctcctccttctactgcctggaatactttccttcgcagatgctgagaaccggcaacaacttccagtttacttacaccttcgaggacgtgcctttccacagcagctacgcccacagccagagcttggaccggctgatgaatcctctgattgaccagtacctgtactacttgtctcggactcaaacaacaggaggcacggcaaatacgcagactctgggcttcagccaaggtgggcctaatacaatggccaatcaggcaaagaactggctgccaggaccctgttaccgccaacaacgcgtctcaacgacaaccgggcaaaacaacaatagcaactttgcctggactgctgggaccaaataccatctgaatggaagaaattcattggctaatcctggcatcgctatggcaacacacaaagacgacgaggagcgtttttttcccagtaacgggatcctgatttttggcaaacaaaatgctgccagagacaatgcggattacagcgatgtcatgctcaccagcgaggaagaaatcaaaaccactaaccctgtggctacagaggaatacggtatcgtggcagataacttgcagcagcaaaacacggctcctcaaattggaactgtcaacagccagggggccttacccggtatggtctggcagaaccgggacgtgtacctgcagggtcccatctgggccaagattcctcacacggacggcaacttccacccgtctccgctgatgggcggctttggcctgaaacatcctccgcctcagatcctgatcaagaacacgcctgtacctgcggatcctccgaccaccttcaaccagtcaaagctgaactctttcatcacgcaatacagcaccggacaggtcagcgtggaaattgaatgggagctgcagaaggaaaacagcaagcgctggaaccccgagatccagtacacctccaactactacaaatctacaagtgtggactttgctgttaatacagaaggcgtgtactctgaaccccgccccattggcacccgttacctcacccgtaatctgtaa

SEQ ID NO: 1167 - protein, 733 aa, Artificial Sequence; identical to SEQ ID NO: 952
  source: /note="Description of Artificial Sequence: Synthetic polypeptide"

SEQ ID NO: 1168 - DNA, 2203 bp, Artificial Sequence
  source: /note="Description of Artificial Sequence: Synthetic polynucleotide"
atgtcttttgttgatcaccctccagattggttggaagaagttggtgaaggtcttcgcgagtttttgggccttgaagcgggcccaccgaaaccaaaacccaatcagcagcatcaagatcaagcccgtggtcttgtgctgcctggttataactatctcggacccggaaacggtctcgatcgaggagagcctgtcaacagggcagacgaggtcgcgcgagagcacgacatctcgtacaacgagcagcttgaggcgggagacaacccctacctcaagtacaaccacgcggacgccgagtttcaggagaagctcgccgacgacacatccttcgggggaaacctcggaaaggcagtctttcaggccaagaaaagggttctcgaaccttttggcctggttgaagagggtgctaagacggcccctaccggaaagcggatagacgaccactttccaaaaagaaagaaggctcggaccgaagaggactccaagccttccacctcgtcagacgccgaagctggacccagcggatcccagcagctgcaaatcccagcccaaccagcctcaagtttgggagctgatacaatgtctgcgggaggtggcggcccattgggcgacaataaccaaggtgccgatggagtgggcaatgcctcgggagattggcattgcgattccacgtggatgggggacagagtcgtcaccaagtccacccgaacctgggtgctgcccagctacaacaaccaccagtaccgagagatcaaaagcggctccgtcgacggaagcaacgccaacgcctactttggatacagcaccccctgggggtactttgactttaaccgcttccacagccactggagcccccgagactggcaaagactcatcaacaactactggggcttcagaccccggtccctcagagtcaaaatcttcaacattcaagtcaaagaggtcacggtgcaggactccaccaccaccatcgccaacaacctcacctccaccgtccaagtgtttacggacgacgactaccagctgccctacgtcgtcggcaacgggaccgagggatgcctgccggccttccctccgcaggtctttacgctgccgcagtacggttacgcgacgctgaaccgcgacaacacagaaaatcccaccgagaggagcagcttcttctgcctagagtactttcccagcaagatgctgagaacgggcaacaactttgagtttacctacaactttgaggaggtgcccttccactccagcttcgctcccagtcagaacctgttcaagctggccaacccgctggtggaccagtacttgtaccgcttcgtgagcacaaataacactggcggagtccagttcaacaagaacctggccgggagatacgccaacacctacaaaaactggttcccggggcccatgggccgaacccagggctggaacctgggctccggggtcaaccgcgccagtgtcagcgccttcgccacgaccaataggatggagctcgagggcgcgagttaccaggtgcccccgcagccgaacggcatgaccaacaacctccagggcagcaacacctatgccctggagaacactatgatcttcaacagccagccggcgaacccgggcaccaccgccacgtacctcgagggcaacatgctcatcaccagcgagagcgagacgcagccggtgaaccgcgtggcgtacaacgtcggcgggcaggtggccaccaacaaccagagctccaccactgcccccgcgaccggcacgtacaacctccaggaaatcgtgcccggcagcgtgtggatggagagggacgtgtacctccaaggacccatctgggccaagatcccagagacgggggcgcactttcacccctctccggccatgggcggattcggactcaaacacccaccgcccatgatgctcatcaagaacacgcctgtgcccggaaatatcaccagcttctcggacgtgcccgtcagcagcttcatcacccagtacagcaccgggcaggtcaccgtggagatggagtgggagctcaagaaggaaaactccaagaggtggaacccagagatccagtacacaaacaactacaacgacccccagtttgtggactttgccccggacagcaccggggaatacagaaccaccagacctatcggaacccgataccttacccgacccctttaacccattcatgtcgcataccctcaataaa

SEQ ID NO: 1169 - protein, 724 aa, Artificial Sequence
  source: /note="Description of Artificial Sequence: Synthetic polypeptide"
MSFVDHPPDWLEEVGEGLREFLGLEAGPPKPKPNQQHQDQARGLVLPGYNYLGPGNGLDRGEPVNRADEVAREHDISYNEQLEAGDNPYLKYNHADAEFQEKLADDTSFGGNLGKAVFQAKKRVLEPFGLVEEGAKTAPTGKRIDDHFPKRKKARTEEDSKPSTSSDAEAGPSGSQQLQIPAQPASSLGADTMSAGGGGPLGDNNQGADGVGNASGDWHCDSTWMGDRVVTKSTRTWVLPSYNNHQYREIKSGSVDGSNANAYFGYSTPWGYFDFNRFHSHWSPRDWQRLINNYWGFRPRSLRVKIFNIQVKEVTVQDSTTTIANNLTSTVQVFTDDDYQLPYVVGNGTEGCLPAFPPQVFTLPQYGYATLNRDNTENPTERSSFFCLEYFPSKMLRTGNNFEFTYNFEEVPFHSSFAPSQNLFKLANPLVDQYLYRFVSTNNTGGVQFNKNLAGRYANTYKNWFPGPMGRTQGWNLGSGVNRASVSAFATTNRMELEGASYQVPPQPNGMTNNLQGSNTYALENTMIFNSQPANPGTTATYLEGNMLITSESETQPVNRVAYNVGGQVATNNQSSTTAPATGTYNLQEIVPGSVWMERDVYLQGPIWAKIPETGAHFHPSPAMGGFGLKHPPPMMLIKNTPVPGNITSFSDVPVSSFITQYSTGQVTVEMEWELKKENSKRWNPEIQYTNNYNDPQFVDFAPDSTGEYRTTRPIGTRYLTRPL

SEQ ID NO: 1170 - DNA, 2203 bp, Artificial Sequence
  source: /note="Description of Artificial Sequence: Synthetic polynucleotide"
atgtcttttgttgatcaccctccagattggttggaagaagttggtgaaggtcttcgcgagtttttgggccttgaagcgggcccaccgaaaccaaaacccaatcagcagcatcaagatcaagcccgtggtcttgtgctgcctggttataactatctcggacccggaaacggtctcgatcgaggagagcctgtcaacagggcagacgaggtcgcgcgagagcacgacatctcgtacaacgagcagcttgaggcgggagacaacccctacctcaagtacaaccacgcggacgccgagtttcaggagaagctcgccgacgacacatccttcgggggaaacctcggaaaggcagtctttcaggccaagaaaagggttctcgaaccttttggcctggttgaagagggtgctaagacggcccctaccggaaagcggatagacgaccactttccaaaaagaaagaaggctcggaccgaagaggactccaagccttccacctcgtcagacgccgaagctggacccagcggatcccagcagctgcaaatcccagcccaaccagcctcaagtttgggagctgatacaatgtctgcgggaggtggcggcccattgggcgacaataaccaaggtgccgatggagtgggcaatgcctcgggagattggcattgcgattccacgtggatgggggacagagtcgtcaccaagtccacccgaacctgggtgctgcccagctacaacaaccaccagtaccgagagatcaaaagcggctccgtcgacggaagcaacgccaacgcctactttggatacagcaccccctgggggtactttgactttaaccgcttccacagccactggagcccccgagactggcaaagactcatcaacaactactggggcttcagaccccggtccctcagagtcaaaatcttcaacattcaagtcaaagaggtcacggtgcaggactccaccaccaccatcgccaacaacctcacctccaccgtccaagtgtttacggacgacgactaccagctgccctacgtcgtcggcaacgggaccgagggatgcctgccggccttccctccgcaggtctttacgctgccgcagtacggttacgcgacgctgaaccgcgacaacacagaaaatcccaccgagaggagcagcttcttctgcctagagtactttcccagcaagatgctgagaacgggcaacaactttgagtttacctacaactttgaggaggtgcccttccactccagcttcgctcccagtcagaacctgttcaagctggccaacccgctggtggaccagtacttgtaccgcttcgtgagcacaaataacactggcggagtccagttcaacaagaacctggccgggagatacgccaacacctacaaaaactggttcccggggcccatgggccgaacccagggctggaacctgggctccggggtcaaccgcgccagtgtcagcgccttcgccacgaccaataggatggagctcgagggcgcgagttaccaggtgcccccgcagccgaacggcatgaccaacaacctccagggcagcaacacctatgccctggagaacactatgatcttcaacagccagccggcgaacccgggcaccaccgccacgtacctcgagggcaacatgctcatcaccagcgagagcgagacgcagccggtgaaccgcgtggcgtacaacgtcggcgggcagatggccaccaacaaccagagctccaccactgcccccgcgaccggcacggtcaacctccaggaaatcgtgcccggcagcgtgtggatggagagggacgtgtacctccaaggacccatctgggccaagatcccagagacgggggcgcactttcacccctctccggccatgggcggattcggactcaaacacccaccgcccatgatgctcatcaagaacacgcctgtgcccggaaatatcaccagcttctcggacgtgcccgtcagcagcttcatcacccagtacagcaccgggcaggtcaccgtggagatggagtgggagctcaagaaggaaaactccaagaggtggaacccagagatccagtacacaaacaactacaacgacccccagtttgtggactttgccccggacagcaccggggaatacagaaccaccagacctatcggaacccgataccttacccgacccctttaacccattcatgtcgcataccctcaataaa

SEQ ID NO: 1171 - protein, 724 aa, Artificial Sequence
  source: /note="Description of Artificial Sequence: Synthetic polypeptide"
MSFVDHPPDWLEEVGEGLREFLGLEAGPPKPKPNQQHQDQARGLVLPGYNYLGPGNGLDRGEPVNRADEVAREHDISYNEQLEAGDNPYLKYNHADAEFQEKLADDTSFGGNLGKAVFQAKKRVLEPFGLVEEGAKTAPTGKRIDDHFPKRKKARTEEDSKPSTSSDAEAGPSGSQQLQIPAQPASSLGADTMSAGGGGPLGDNNQGADGVGNASGDWHCDSTWMGDRVVTKSTRTWVLPSYNNHQYREIKSGSVDGSNANAYFGYSTPWGYFDFNRFHSHWSPRDWQRLINNYWGFRPRSLRVKIFNIQVKEVTVQDSTTTIANNLTSTVQVFTDDDYQLPYVVGNGTEGCLPAFPPQVFTLPQYGYATLNRDNTENPTERSSFFCLEYFPSKMLRTGNNFEFTYNFEEVPFHSSFAPSQNLFKLANPLVDQYLYRFVSTNNTGGVQFNKNLAGRYANTYKNWFPGPMGRTQGWNLGSGVNRASVSAFATTNRMELEGASYQVPPQPNGMTNNLQGSNTYALENTMIFNSQPANPGTTATYLEGNMLITSESETQPVNRVAYNVGGQMATNNQSSTTAPATGTVNLQEIVPGSVWMERDVYLQGPIWAKIPETGAHFHPSPAMGGFGLKHPPPMMLIKNTPVPGNITSFSDVPVSSFITQYSTGQVTVEMEWELKKENSKRWNPEIQYTNNYNDPQFVDFAPDSTGEYRTTRPIGTRYLTRPL

SEQ ID NO: 1172 - DNA, 2203 bp, Artificial Sequence
  source: /note="Description of Artificial Sequence: Synthetic polynucleotide"
atgtcttttgttgatcaccctccagattggttggaagaagttggtgaaggtcttcgcgagtttttgggccttgaagcgggcccaccgaaaccaaaacccaatcagcagcatcaagatcaagcccgtggtcttgtgctgcctggttataactatctcggacccggaaacggtctcgatcgaggagagcctgtcaacagggcagacgaggtcgcgcgagagcacgacatctcgtacaacgagcagcttgaggcgggagacaacccctacctcaagtacaaccacgcggacgccgagtttcaggagaagctcgccgacgacacatccttcgggggaaacctcggaaaggcagtctttcaggccaagaaaagggttctcgaaccttttggcctggttgaagagggtgctaagacggcccctaccggaaagcggatagacgaccactttccaaaaagaaagaaggctcggaccgaagaggactccaagccttccacctcgtcagacgccgaagctggacccagcggatcccagcagctgcaaatcccagcccaaccagcctcaagtttgggagctgatacaatgtctgcgggaggtggcggcccattgggcgacaataaccaaggtgccgatggagtgggcaatgcctcgggagattggcattgcgattccacgtggatgggggacagagtcgtcaccaagtccacccgaacctgggtgctgcccagctacaacaaccaccagtaccgagagatcaaaagcggctccgtcgacggaagcaacgccaacgcctactttggatacagcaccccctgggggtactttgactttaaccgcttccacagccactggagcccccgagactggcaaagactcatcaacaactactggggcttcagaccccggtccctcagagtcaaaatcttcaacattcaagtcaaagaggtcacggtgcaggactccaccaccaccatcgccaacaacctcacctccaccgtccaagtgtttacggacgacgactaccagctgccctacgtcgtcggcaacgggaccgagggatgcctgccggccttccctccgcaggtctttacgctgccgcagtacggttacgcgacgctgaaccgcgacaacacagaaaatcccaccgagaggagcagcttcttctgcctagagtactttcccagcaagatgctgagaacgggcaacaactttgagtttacctacaactttgaggaggtgcccttccactccagcttcgctcccagtcagaacctgttcaagctggccaacccgctggtggaccagtacttgtaccgcttcgtgagcacaaataacactggcggagtccagttcaacaagaacctggccgggagatacgccaacacctacaaaaactggttcccggggcccatgggccgaacccagggctggaacctgggctccggggtcaaccgcgccagtgtcagcgccttcgccacgaccaataggatggagctcgagggcgcgagttaccaggtgcccccgcagccgaacggcatgaccaacaacctccagggcagcaacacctatgccctggagaacactatgatcttcaacagccagccggcgaacccgggcaccaccgccacgtacctcgagggcaacatgctcatcaccagcgagagcgagacgcagccggtgaaccgcgtggcgtacaacgtcggcgggcagatggccaccaacaaccagagctccaccactgcccccgcgaccggcacgtacaacacccaggaaatcgtgcccggcagcgtgtggatggagagggacgtgtacctccaaggacccatctgggccaagatcccagagacgggggcgcactttcacccctctccggccatgggcggattcggactcaaacacccaccgcccatgatgctcatcaagaacacgcctgtgcccggaaatatcaccagcttctcggacgtgcccgtcagcagcttcatcacccagtacagcaccgggcaggtcaccgtggagatggagtgggagctcaagaaggaaaactccaagaggtggaacccagagatccagtacacaaacaactacaacgacccccagtttgtggactttgccccggacagcaccggggaatacagaaccaccagacctatcggaacccgataccttacccgacccctttaacccattcatgtcgcataccctcaataaa

SEQ ID NO: 1173 - protein, 724 aa, Artificial Sequence
  source: /note="Description of Artificial Sequence: Synthetic polypeptide"
MSFVDHPPDWLEEVGEGLREFLGLEAGPPKPKPNQQHQDQARGLVLPGYNYLGPGNGLDRGEPVNRADEVAREHDISYNEQLEAGDNPYLKYNHADAEFQEKLADDTSFGGNLGKAVFQAKKRVLEPFGLVEEGAKTAPTGKRIDDHFPKRKKARTEEDSKPSTSSDAEAGPSGSQQLQIPAQPASSLGADTMSAGGGGPLGDNNQGADGVGNASGDWHCDSTWMGDRVVTKSTRTWVLPSYNNHQYREIKSGSVDGSNANAYFGYSTPWGYFDFNRFHSHWSPRDWQRLINNYWGFRPRSLRVKIFNIQVKEVTVQDSTTTIANNLTSTVQVFTDDDYQLPYVVGNGTEGCLPAFPPQVFTLPQYGYATLNRDNTENPTERSSFFCLEYFPSKMLRTGNNFEFTYNFEEVPFHSSFAPSQNLFKLANPLVDQYLYRFVSTNNTGGVQFNKNLAGRYANTYKNWFPGPMGRTQGWNLGSGVNRASVSAFATTNRMELEGASYQVPPQPNGMTNNLQGSNTYALENTMIFNSQPANPGTTATYLEGNMLITSESETQPVNRVAYNVGGQMATNNQSSTTAPATGTYNTQEIVPGSVWMERDVYLQGPIWAKIPETGAHFHPSPAMGGFGLKHPPPMMLIKNTPVPGNITSFSDVPVSSFITQYSTGQVTVEMEWELKKENSKRWNPEIQYTNNYNDPQFVDFAPDSTGEYRTTRPIGTRYLTRPL

SEQ ID NO: 1174 - DNA, 2203 bp, Artificial Sequence
  source: /note="Description of Artificial Sequence: Synthetic polynucleotide"
atgtcttttgttgatcaccctccagattggttggaagaagttggtgaaggtcttcgcgagtttttgggccttgaagcgggcccaccgaaaccaaaacccaatcagcagcatcaagatcaagcccgtggtcttgtgctgcctggttataactatctcggacccggaaacggtctcgatcgaggagagcctgtcaacagggcagacgaggtcgcgcgagagcacgacatctcgtacaacgagcagcttgaggcgggagacaacccctacctcaagtacaaccacgcggacgccgagtttcaggagaagctcgccgacgacacatccttcgggggaaacctcggaaaggcagtctttcaggccaagaaaagggttctcgaaccttttggcctggttgaagagggtgctaagacggcccctaccggaaagcggatagacgaccactttccaaaaagaaagaaggctcggaccgaagaggactccaagccttccacctcgtcagacgccgaagctggacccagcggatcccagcagctgcaaatcccagcccaaccagcctcaagtttgggagctgatacaatgtctgcgggaggtggcggcccattgggcgacaataaccaaggtgccgatggagtgggcaatgcctcgggagattggcattgcgattccacgtggatgggggacagagtcgtcaccaagtccacccgaacctgggtgctgcccagctacaacaaccaccagtaccgagagatcaaaagcggctccgtcgacggaagcaacgccaacgcctactttggatacagcaccccctgggggtactttgactttaaccgcttccacagccactggagcccccgagactggcaaagactcatcaacaactactggggcttcagaccccggtccctcagagtcaaaatcttcaacattcaagtcaaagaggtcacggtgcaggactccaccaccaccatcgccaacaacctcacctccaccgtccaagtgtttacggacgacgactaccagctgccctacgtcgtcggcaacgggaccgagggatgcctgccggccttccctccgcaggtctttacgctgccgcagtacggttacgcgacgctgaaccgcgacaacacagaaaatcccaccgagaggagcagcttcttctgcctagagtactttcccagcaagatgctgagaacgggcaacaactttgagtttacctacaactttgaggaggtgcccttccactccagcttcgctcccagtcagaacctgttcaagctggccaacccgctggtggaccagtacttgtaccgcttcgtgagcacaaataacactggcggagtccagttcaacaagaacctggccgggagatacgccaacacctacaaaaactggttcccggggcccatgggccgaacccagggctggaacctgggctccggggtcaaccgcgccagtgtcagcgccttcgccacgaccaataggatggagctcgagggcgcgagttaccaggtgcccccgcagccgaacggcatgaccaacaacctccagggcagcaacacctatgccctggagaacactatgatcttcaacagccagccggcgaacccgggcaccaccgccacgtacctcgagggcaacatgctcatcaccagcgagagcgagacgcagccggtgaaccgcgtggcgtacaacgtcggcgggcagatggccaccaacaaccagagctccaccactgcccccgcgaccggcacggtcaacacccaggaaatcgtgcccggcagcgtgtggatggagagggacgtgtacctccaaggacccatctgggccaagatcccagagacgggggcgcactttcacccctctccggccatgggcggattcggactcaaacacccaccgcccatgatgctcatcaagaacacgcctgtgcccggaaatatcaccagcttctcggacgtgcccgtcagcagcttcatcacccagtacagcaccgggcaggtcaccgtggagatggagtgggagctcaagaaggaaaactccaagaggtggaacccagagatccagtacacaaacaactacaacgacccccagtttgtggactttgccccggacagcaccggggaatacagaaccaccagacctatcggaacccgataccttacccgacccctttaacccattcatgtcgcataccctcaataaa

SEQ ID NO: 1175 - protein, 724 aa, Artificial Sequence
  source: /note="Description of Artificial Sequence: Synthetic polypeptide"
MSFVDHPPDWLEEVGEGLREFLGLEAGPPKPKPNQQHQDQARGLVLPGYNYLGPGNGLDRGEPVNRADEVAREHDISYNEQLEAGDNPYLKYNHADAEFQEKLADDTSFGGNLGKAVFQAKKRVLEPFGLVEEGAKTAPTGKRIDDHFPKRKKARTEEDSKPSTSSDAEAGPSGSQQLQIPAQPASSLGADTMSAGGGGPLGDNNQGADGVGNASGDWHCDSTWMGDRVVTKSTRTWVLPSYNNHQYREIKSGSVDGSNANAYFGYSTPWGYFDFNRFHSHWSPRDWQRLINNYWGFRPRSLRVKIFNIQVKEVTVQDSTTTIANNLTSTVQVFTDDDYQLPYVVGNGTEGCLPAFPPQVFTLPQYGYATLNRDNTENPTERSSFFCLEYFPSKMLRTGNNFEFTYNFEEVPFHSSFAPSQNLFKLANPLVDQYLYRFVSTNNTGGVQFNKNLAGRYANTYKNWFPGPMGRTQGWNLGSGVNRASVSAFATTNRMELEGASYQVPPQPNGMTNNLQGSNTYALENTMIFNSQPANPGTTATYLEGNMLITSESETQPVNRVAYNVGGQMATNNQSSTTAPATGTVNTQEIVPGSVWMERDVYLQGPIWAKIPETGAHFHPSPAMGGFGLKHPPPMMLIKNTPVPGNITSFSDVPVSSFITQYSTGQVTVEMEWELKKENSKRWNPEIQYTNNYNDPQFVDFAPDSTGEYRTTRPIGTRYLTRPL

SEQ ID NO: 1176 - DNA, 2203 bp, Artificial Sequence
  source: /note="Description of Artificial Sequence: Synthetic polynucleotide"
atgtcttttgttgatcaccctccagattggttggaagaagttggtgaaggtcttcgcgagtttttgggccttgaagcgggcccaccgaaaccaaaacccaatcagcagcatcaagatcaagcccgtggtcttgtgctgcctggttataactatctcggacccggaaacggtctcgatcgaggagagcctgtcaacagggcagacgaggtcgcgcgagagcacgacatctcgtacaacgagcagcttgaggcgggagacaacccctacctcaagtacaaccacgcggacgccgagtttcaggagaagctcgccgacgacacatccttcgggggaaacctcggaaaggcagtctttcaggccaagaaaagggttctcgaaccttttggcctggttgaagagggtgctaagacggcccctaccggaaagcggatagacgaccactttccaaaaagaaagaaggctcggaccgaagaggactccaagccttccacctcgtcagacgccgaagctggacccagcggatcccagcagctgcaaatcccagcccaaccagcctcaagtttgggagctgatacaatgtctgcgggaggtggcggcccattgggcgacaataaccaaggtgccgatggagtgggcaatgcctcgggagattggcattgcgattccacgtggatgggggacagagtcgtcaccaagtccacccgaacctgggtgctgcccagctacaacaaccaccagtaccgagagatcaaaagcggctccgtcgacggaagcaacgccaacgcctactttggatacagcaccccctgggggtactttgactttaaccgcttccacagccactggagcccccgagactggcaaagactcatcaacaactactggggcttcagaccccggtccctcagagtcaaaatcttcaacattcaagtcaaagaggtcacggtgcaggactccaccaccaccatcgccaacaacctcacctccaccgtccaagtgtttacggacgacgactaccagctgccctacgtcgtcggcaacgggaccgagggatgcctgccggccttccctccgcaggtctttacgctgccgcagtacggttacgcgacgctgaaccgcgacaacacagaaaatcccaccgagaggagcagcttcttctgcctagagtactttcccagcaagatgctgagaacgggcaacaactttgagtttacctacaactttgaggaggtgcccttccactccagcttcgctcccagtcagaacctgttcaagctggccaacccgctggtggaccagtacttgtaccgcttcgtgagcacaaataacactggcggagtccagttcaacaagaacctggccgggagatacgccaacacctacaaaaactggttcccggggcccatgggccgaacccagggctggaacctgggctccggggtcaaccgcgccagtgtcagcgccttcgccacgaccaataggatggagctcgagggcgcgagttaccaggtgcccccgcagccgaacggcatgaccaacaacctccagggcagcaacacctatgccctggagaacactatgatcttcaacagccagccggcgaacccgggcaccaccgccacgtacctcgagggcaacatgctcatcaccagcgagagcgagacgcagccggtgaaccgcgtggcgtacaacgtcggcgggcagatggccaccaacaaccagagctccaccactgcccccgcgaccggcacgtacaacctccaggaaatcgtgcccggcagcgtgtggatggagagggacgtgtacctccaaggacccatctgggccaagatcccagagacgggggcgcactttcacccctctccggccatgggcggattcggactcaaacacccaccgcccatgatgctcatcaagaacacgcctgtgcccggaaatatcaccagcttctcggccgtgcccgtcagcagcttcatcacccagtacagcaccgggcaggtcaccgtggagatggagtgggagctcaagaaggaaaactccaagaggtggaacccagagatccagtacacaaacaactacaacgacccccagtttgtggactttgccccggacagcaccggggaatacagaaccaccagacctatcggaacccgataccttacccgacccctttaacccattcatgtcgcataccctcaataaa

SEQ ID NO: 1177 - protein, 724 aa, Artificial Sequence
  source: /note="Description of Artificial Sequence: Synthetic polypeptide"
MSFVDHPPDWLEEVGEGLREFLGLEAGPPKPKPNQQHQDQARGLVLPGYNYLGPGNGLDRGEPVNRADEVAREHDISYNEQLEAGDNPYLKYNHADAEFQEKLADDTSFGGNLGKAVFQAKKRVLEPFGLVEEGAKTAPTGKRIDDHFPKRKKARTEEDSKPSTSSDAEAGPSGSQQLQIPAQPASSLGADTMSAGGGGPLGDNNQGADGVGNASGDWHCDSTWMGDRVVTKSTRTWVLPSYNNHQYREIKSGSVDGSNANAYFGYSTPWGYFDFNRFHSHWSPRDWQRLINNYWGFRPRSLRVKIFNIQVKEVTVQDSTTTIANNLTSTVQVFTDDDYQLPYVVGNGTEGCLPAFPPQVFTLPQYGYATLNRDNTENPTERSSFFCLEYFPSKMLRTGNNFEFTYNFEEVPFHSSFAPSQNLFKLANPLVDQYLYRFVSTNNTGGVQFNKNLAGRYANTYKNWFPGPMGRTQGWNLGSGVNRASVSAFATTNRMELEGASYQVPPQPNGMTNNLQGSNTYALENTMIFNSQPANPGTTATYLEGNMLITSESETQPVNRVAYNVGGQMATNNQSSTTAPATGTYNLQEIVPGSVWMERDVYLQGPIWAKIPETGAHFHPSPAMGGFGLKHPPPMMLIKNTPVPGNITSFSAVPVSSFITQYSTGQVTVEMEWELKKENSKRWNPEIQYTNNYNDPQFVDFAPDSTGEYRTTRPIGTRYLTRPL

SEQ ID NO: 1178 - DNA, 2203 bp, Artificial Sequence
  source: /note="Description of Artificial Sequence: Synthetic polynucleotide"
atgtcttttgttgatcaccctccagattggttggaagaagttggtgaaggtcttcgcgagtttttgggccttgaagcgggcccaccgaaaccaaaacccaatcagcagcatcaagatcaagcccgtggtcttgtgctgcctggttataactatctcggacccggaaacggtctcgatcgaggagagcctgtcaacagggcagacgaggtcgcgcgagagcacgacatctcgtacaacgagcagcttgaggcgggagacaacccctacctcaagtacaaccacgcggacgccgagtttcaggagaagctcgccgacgacacatccttcgggggaaacctcggaaaggcagtctttcaggccaagaaaagggttctcgaaccttttggcctggttgaagagggtgctaagacggcccctaccggaaagcggatagacgaccactttccaaaaagaaagaaggctcggaccgaagaggactccaagccttccacctcgtcagacgccgaagctggacccagcggatcccagcagctgcaaatcccagcccaaccagcctcaagtttgggagctgatacaatgtctgcgggaggtggcggcccattgggcgacaataaccaaggtgccgatggagtgggcaatgcctcgggagattggcattgcgattccacgtggatgggggacagagtcgtcaccaagtccacccgaacctgggtgctgcccagctacaacaaccaccagtaccgagagatcaaaagcggctccgtcgacggaagcaacgccaacgcctactttggatacagcaccccctgggggtactttgactttaaccgcttccacagccactggagcccccgagactggcaaagactcatcaacaactactggggcttcagaccccggtccctcagagtcaaaatcttcaacattcaagtcaaagaggtcacggtgcaggactccaccaccaccatcgccaacaacctcacctccaccgtccaagtgtttatggacgacgactaccagctgccctacgtcgtcggcaacgggaccgagggatgcctgccggccttccctccgcaggtctttacgctgccgcagtacggttacgcgacgctgaaccgcgacaacacagaaaatcccaccgagaggagcagcttcttctgcctagagtactttcccagcaagatgctgagaacgggcaacaactttgagtttacctacaactttgaggaggtgcccttccactccagcttcgctcccagtcagaacctgttcaagctggccaacccgctggtggaccagtacttgtaccgcttcgtgagcacaaataacactggcggagtccagttcaacaagaacctggccgggagatacgccaacacctacaaaaactggttcccggggcccatgggccgaacccagggctggaacctgggctccggggtcaaccgcgccagtgtcagcgccttcgccacgaccaataggatggagctcgagggcgcgagttaccaggtgcccccgcagccgaacggcatgaccaacaacctccagggcagcaacacctatgccctggagaacactatgatcttcaacagccagccggcgaacccgggcaccaccgccacgtacctcgagggcaacatgctcatcaccagcgagagcgagacgcagccggtgaaccgcgtggcgtacaacgtcggcgggcagatggccaccaacaaccagagctccaccactgcccccgcgaccggcacgtacaacctccaggaaatcgtgcccggcagcgtgtggatggagagggacgtgtacctccaaggacccatctgggccaagatcccagagacgggggcgcactttcacccctctccggccatgggcggattcggactcaaacacccaccgcccatgatgctcatcaagaacacgcctgtgcccggaaatatcaccagcttctcggacgtgcccgtcagcagcttcatcacccagtacagcaccgggcaggtcaccgtggagatggagtgggagctcaagaaggaaaactccaagaggtggaacccagagatccagtacacaaacaactacaacgacccccagtttgtggactttgccccggacagcaccggggaatacagaaccaccagacctatcggaacccgataccttacccgacccctttaacccattcatgtcgcataccctcaataaa

SEQ ID NO: 1179 - protein, 724 aa, Artificial Sequence
  source: /note="Description of Artificial Sequence: Synthetic polypeptide"
MSFVDHPPDWLEEVGEGLREFLGLEAGPPKPKPNQQHQDQARGLVLPGYNYLGPGNGLDRGEPVNRADEVAREHDISYNEQLEAGDNPYLKYNHADAEFQEKLADDTSFGGNLGKAVFQAKKRVLEPFGLVEEGAKTAPTGKRIDDHFPKRKKARTEEDSKPSTSSDAEAGPSGSQQLQIPAQPASSLGADTMSAGGGGPLGDNNQGADGVGNASGDWHCDSTWMGDRVVTKSTRTWVLPSYNNHQYREIKSGSVDGSNANAYFGYSTPWGYFDFNRFHSHWSPRDWQRLINNYWGFRPRSLRVKIFNIQVKEVTVQDSTTTIANNLTSTVQVFMDDDYQLPYVVGNGTEGCLPAFPPQVFTLPQYGYATLNRDNTENPTERSSFFCLEYFPSKMLRTGNNFEFTYNFEEVPFHSSFAPSQNLFKLANPLVDQYLYRFVSTNNTGGVQFNKNLAGRYANTYKNWFPGPMGRTQGWNLGSGVNRASVSAFATTNRMELEGASYQVPPQPNGMTNNLQGSNTYALENTMIFNSQPANPGTTATYLEGNMLITSESETQPVNRVAYNVGGQMATNNQSSTTAPATGTYNLQEIVPGSVWMERDVYLQGPIWAKIPETGAHFHPSPAMGGFGLKHPPPMMLIKNTPVPGNITSFSDVPVSSFITQYSTGQVTVEMEWELKKENSKRWNPEIQYTNNYNDPQFVDFAPDSTGEYRTTRPIGTRYLTRPL

SEQ ID NO: 1180 - DNA, 2203 bp, Artificial Sequence
  source: /note="Description of Artificial Sequence: Synthetic polynucleotide"
atgtcttttgttgatcaccctccagattggttggaagaagttggtgaaggtcttcgcgagtttttgggccttgaagcgggcccaccgaaaccaaaacccaatcagcagcatcaagatcaagcccgtggtcttgtgctgcctggttataactatctcggacccggaaacggtctcgatcgaggagagcctgtcaacagggcagacgaggtcgcgcgagagcacgacatctcgtacaacgagcagcttgaggcgggagacaacccctacctcaagtacaaccacgcggacgccgagtttcaggagaagctcgccgacgacacatccttcgggggaaacctcggaaaggcagtctttcaggccaagaaaagggttctcgaaccttttggcctggttgaagagggtgctaagacggcccctaccggaaagcggatagacgaccactttccaaaaagaaagaaggctcggaccgaagaggactccaagccttccacctcgtcagacgccgaagctggacccagcggatcccagcagctgcaaatcccagcccaaccagcctcaagtttgggagctgatacaatgtctgcgggaggtggcggcccattgggcgacaataaccaaggtgccgatggagtgggcaatgcctcgggagattggcattgcgattccacgtggatgggggacagagtcgtcaccaagtccacccgaacctgggtgctgcccagctacaacaaccaccagtaccgagagatcaaaagcggctccgtcgacggaagcaacgccaacgcctactttggatacagcaccccctgggggtactttgactttaaccgcttccacagccactggagcccccgagactggcaaagactcatcaacaactactggggcttcagaccccggtccctcagagtcaaaatcttcaacattcaagtcaaagaggtcacggtgcaggactccaccaccaccatcgccaacaacctcacctccaccgtcgatgtgtttacggacgacgactaccagctgccctacgtcgtcggcaacgggaccgagggatgcctgccggccttccctccgcaggtctttacgctgccgcagtacggttacgcgacgctgaaccgcgacaacacagaaaatcccaccgagaggagcagcttcttctgcctagagtactttcccagcaagatgctgagaacgggcaacaactttgagtttacctacaactttgaggaggtgcccttccactccagcttcgctcccagtcagaacctgttcaagctggccaacccgctggtggaccagtacttgtaccgcttcgtgagcacaaataacactggcggagtccagttcaacaagaacctggccgggagatacgccaacacctacaaaaactggttcccggggcccatgggccgaacccagggctggaacctgggctccggggtcaaccgcgccagtgtcagcgccttcgccacgaccaataggatggagctcgagggcgcgagttaccaggtgcccccgcagccgaacggcatgaccaacaacctccagggcagcaacacctatgccctggagaacactatgatcttcaacagccagccggcgaacccgggcaccaccgccacgtacctcgagggcaacatgctcatcaccagcgagagcgagacgcagccggtgaaccgcgtggcgtacaacgtcggcgggcagatggccaccaacaaccagagctccaccactgcccccgcgaccggcacgtacaacctccaggaaatcgtgcccggcagcgtgtggatggagagggacgtgtacctccaaggacccatctgggccaagatcccagagacgggggcgcactttcacccctctccggccatgggcggattcggactcaaacacccaccgcccatgatgctcatcaagaacacgcctgtgcccggaaatatcaccagcttctcggacgtgcccgtcagcagcttcatcacccagtacagcaccgggcaggtcaccgtggagatggagtgggagctcaagaaggaaaactccaagaggtggaacccagagatccagtacacaaacaactacaacgacccccagtttgtggactttgccccggacagcaccggggaatacagaaccaccagacctatcggaacccgataccttacccgacccctttaacccattcatgtcgcataccctcaataaa

SEQ ID NO: 1181 - protein, 724 aa, Artificial Sequence
  source: /note="Description of Artificial Sequence: Synthetic polypeptide"
MSFVDHPPDWLEEVGEGLREFLGLEAGPPKPKPNQQHQDQARGLVLPGYNYLGPGNGLDRGEPVNRADEVAREHDISYNEQLEAGDNPYLKYNHADAEFQEKLADDTSFGGNLGKAVFQAKKRVLEPFGLVEEGAKTAPTGKRIDDHFPKRKKARTEEDSKPSTSSDAEAGPSGSQQLQIPAQPASSLGADTMSAGGGGPLGDNNQGADGVGNASGDWHCDSTWMGDRVVTKSTRTWVLPSYNNHQYREIKSGSVDGSNANAYFGYSTPWGYFDFNRFHSHWSPRDWQRLINNYWGFRPRSLRVKIFNIQVKEVTVQDSTTTIANNLTSTVDVFTDDDYQLPYVVGNGTEGCLPAFPPQVFTLPQYGYATLNRDNTENPTERSSFFCLEYFPSKMLRTGNNFEFTYNFEEVPFHSSFAPSQNLFKLANPLVDQYLYRFVSTNNTGGVQFNKNLAGRYANTYKNWFPGPMGRTQGWNLGSGVNRASVSAFATTNRMELEGASYQVPPQPNGMTNNLQGSNTYALENTMIFNSQPANPGTTATYLEGNMLITSESETQPVNRVAYNVGGQMATNNQSSTTAPATGTYNLQEIVPGSVWMERDVYLQGPIWAKIPETGAHFHPSPAMGGFGLKHPPPMMLIKNTPVPGNITSFSDVPVSSFITQYSTGQVTVEMEWELKKENSKRWNPEIQYTNNYNDPQFVDFAPDSTGEYRTTRPIGTRYLTRPL

SEQ ID NO: 1182 - DNA, 2203 bp, Artificial Sequence
  source: /note="Description of Artificial Sequence: Synthetic polynucleotide"
atgtcttttgttgatcaccctccagattggttggaagaagttggtgaaggtcttcgcgagtttttgggccttgaagcgggcccaccgaaaccaaaacccaatcagcagcatcaagatcaagcccgtggtcttgtgctgcctggttataactatctcggacccggaaacggtctcgatcgaggagagcctgtcaacagggcagacgaggtcgcgcgagagcacgacatctcgtacaacgagcagcttgaggcgggagacaacccctacctcaagtacaaccacgcggacgccgagtttcaggagaagctcgccgacgacacatccttcgggggaaacctcggaaaggcagtctttcaggccaagaaaagggttctcgaaccttttggcctggttgaagagggtgctaagacggcccctaccggaaagcggatagacgaccactttccaaaaagaaagaaggctcggaccgaagaggactccaagccttccacctcgtcagacgccgaagctggacccagcggatcccagcagctgcaaatcccagcccaaccagcctcaagtttgggagctgatacaatgtctgcgggaggtggcggcccattgggcgacaataaccaaggtgccgatggagtgggcaatgcctcgggagattggcattgcgattccacgtggatgggggacagagtcgtcaccaagtccacccgaacctgggtgctgcccagctacaacaaccaccagtaccgagagatcaaaagcggctccgtcgacggaagcaacgccaacgcctactttggatacagcaccccctgggggtactttgactttaaccgcttccacagccactggagcccccgagactggcaaagactcatcaacaactactggggcttcagaccccggtccctcagagtcaaaatcttcaacattcaagtcaaagaggtcacggtgcaggactccaccaccaccatcgccaacaacctcacctccaccgtccaagtgtttacggacgacgactaccagctgccctacgtcgtcggcaacgggacccagggatgcctgccggccttccctccgcaggtctttacgctgccgcagtacggttacgcgacgctgaaccgcgacaacacagaaaatcccaccgagaggagcagcttcttctgcctagagtactttcccagcaagatgctgagaacgggcaacaactttgagtttacctacaactttgaggaggtgcccttccactccagcttcgctcccagtcagaacctgttcaagctggccaacccgctggtggaccagtacttgtaccgcttcgtgagcacaaataacactggcggagtccagttcaacaagaacctggccgggagatacgccaacacctacaaaaactggttcccggggcccatgggccgaacccagggctggaacctgggctccggggtcaaccgcgccagtgtcagcgccttcgccacgaccaataggatggagctcgagggcgcgagttaccaggtgcccccgcagccgaacggcatgaccaacaacctccagggcagcaacacctatgccctggagaacactatgatcttcaacagccagccggcgaacccgggcaccaccgccacgtacctcgagggcaacatgctcatcaccagcgagagcgagacgcagccggtgaaccgcgtggcgtacaacgtcggcgggcagatggccaccaacaaccagagctccaccactgcccccgcgaccggcacgtacaacctccaggaaatcgtgcccggcagcgtgtggatggagagggacgtgtacctccaaggacccatctgggccaagatcccagagacgggggcgcactttcacccctctccggccatgggcggattcggactcaaacacccaccgcccatgatgctcatcaagaacacgcctgtgcccggaaatatcaccagcttctcggacgtgcccgtcagcagcttcatcacccagtacagcaccgggcaggtcaccgtggagatggagtgggagctcaagaaggaaaactccaagaggtggaacccagagatccagtacacaaacaactacaacgacccccagtttgtggactttgccccggacagcaccggggaatacagaaccaccagacctatcggaacccgataccttacccgacccctttaacccattcatgtcgcataccctcaataaa

SEQ ID NO: 1183 - protein, 724 aa, Artificial Sequence
  source: /note="Description of Artificial Sequence: Synthetic polypeptide"
MSFVDHPPDWLEEVGEGLREFLGLEAGPPKPKPNQQHQDQARGLVLPGYNYLGPGNGLDRGEPVNRADEVAREHDISYNEQLEAGDNPYLKYNHADAEFQEKLADDTSFGGNLGKAVFQAKKRVLEPFGLVEEGAKTAPTGKRIDDHFPKRKKARTEEDSKPSTSSDAEAGPSGSQQLQIPAQPASSLGADTMSAGGGGPLGDNNQGADGVGNASGDWHCDSTWMGDRVVTKSTRTWVLPSYNNHQYREIKSGSVDGSNANAYFGYSTPWGYFDFNRFHSHWSPRDWQRLINNYWGFRPRSLRVKIFNIQVKEVTVQDSTTTIANNLTSTVQVFTDDDYQLPYVVGNGTQGCLPAFPPQVFTLPQYGYATLNRDNTENPTERSSFFCLEYFPSKMLRTGNNFEFTYNFEEVPFHSSFAPSQNLFKLANPLVDQYLYRFVSTNNTGGVQFNKNLAGRYANTYKNWFPGPMGRTQGWNLGSGVNRASVSAFATTNRMELEGASYQVPPQPNGMTNNLQGSNTYALENTMIFNSQPANPGTTATYLEGNMLITSESETQPVNRVAYNVGGQMATNNQSSTTAPATGTYNLQEIVPGSVWMERDVYLQGPIWAKIPETGAHFHPSPAMGGFGLKHPPPMMLIKNTPVPGNITSFSDVPVSSFITQYSTGQVTVEMEWELKKENSKRWNPEIQYTNNYNDPQFVDFAPDSTGEYRTTRPIGTRYLTRPL

SEQ ID NO: 1184 - DNA, 2203 bp, Artificial Sequence
  source: /note="Description of Artificial Sequence: Synthetic polynucleotide"
atgtcttttgttgatcaccctccagattggttggaagaagttggtgaaggtcttcgcgagtttttgggccttgaagcgggcccaccgaaaccaaaacccaatcagcagcatcaagatcaagcccgtggtcttgtgctgcctggttataactatctcggacccggaaacggtctcgatcgaggagagcctgtcaacagggcagacgaggtcgcgcgagagcacgacatctcgtacaacgagcagcttgaggcgggagacaacccctacctcaagtacaaccacgcggacgccgagtttcaggagaagctcgccgacgacacatccttcgggggaaacctcggaaaggcagtctttcaggccaagaaaagggttctcgaaccttttggcctggttgaagagggtgctaagacggcccctaccggaaagcggatagacgaccactttccaaaaagaaagaaggctcggaccgaagaggactccaagccttccacctcgtcagacgccgaagctggacccagcggatcccagcagctgcaaatcccagcccaaccagcctcaagtttgggagctgatacaatgtctgcgggaggtggcggcccattgggcgacaataaccaaggtgccgatggagtgggcaatgcctcgggagattggcattgcgattccacgtggatgggggacagagtcgtcaccaagtccacccgaacctgggtgctgcccagctacaacaaccaccagtaccgagagatcaaaagcggctccgtcgacggaagcaacgccaacgcctactttggatacagcaccccctgggggtactttgactttaaccgcttccacagccactggagcccccgagactggcaaagactcatcaacaactactggggcttcagaccccggtccctcagagtcaaaatcttcaacattcaagtcaaagaggtcacggtgcaggactccaccaccaccatcgccaacaacctcacctccaccgtccaagtgtttacggacgacgactaccagctgccctacgtcgtcggcaacgggaccgagggatgcctgccggccttccctccgcaggtctttacgctgccgcagtacggttacgcgacgctgaaccgcgacaacacagaaaatcccaccgagaggagcagcttcttctgcctagagtactttcccagcaagatgctgagaacgggcaacaactttgagtttacctacaactttgaggaggtgcccttccactccagcttcgctcccagtcagaacctgttcaagctggccaacccgctggtggaccagtacttgtaccgcttcgtgagcacaaataacactggcggagtccagttcaacaagaacctggccgggagatacgccaacacctacaaaaactggttcccggggcccatgggccgaacccagggctggaacctgggctccggggtcaaccgcgccagtgtcagcgccttcgccacgaccaataggatggagctcgagggcgcgagttaccaggtgcccccgcagccgaacggcatgaccaacaacctccagggcagcaacacctatgccctggagaacactatgatcttcaacagccagtcggcgaacccgggcaccaccgccacgtacctcgagggcaacatgctcatcaccagcgagagcgagacgcagccggtgaaccgcgtggcgtacaacgtcggcgggcagatggccaccaacaaccagagctccaccactgcccccgcgaccggcacgtacaacctccaggaaatcgtgcccggcagcgtgtggatggagagggacgtgtacctccaaggacccatctgggccaagatcccagagacgggggcgcactttcacccctctccggccatgggcggattcggactcaaacacccaccgcccatgatgctcatcaagaacacgcctgtgcccggaaatatcaccagcttctcggacgtgcccgtcagcagcttcatcacccagtacagcaccgggcaggtcaccgtggagatggagtgggagctcaagaaggaaaactccaagaggtggaacccagagatccagtacacaaacaactacaacgacccccagtttgtggactttgccccggacagcaccggggaatacagaaccaccagacctatcggaacccgataccttacccgacccctttaacccattcatgtcgcataccctcaataaa

SEQ ID NO: 1185 - protein, 724 aa, Artificial Sequence
  source: /note="Description of Artificial Sequence: Synthetic polypeptide"
MSFVDHPPDWLEEVGEGLREFLGLEAGPPKPKPNQQHQDQARGLVLPGYNYLGPGNGLDRGEPVNRADEVAREHDISYNEQLEAGDNPYLKYNHADAEFQEKLADDTSFGGNLGKAVFQAKKRVLEPFGLVEEGAKTAPTGKRIDDHFPKRKKARTEEDSKPSTSSDAEAGPSGSQQLQIPAQPASSLGADTMSAGGGGPLGDNNQGADGVGNASGDWHCDSTWMGDRVVTKSTRTWVLPSYNNHQYREIKSGSVDGSNANAYFGYSTPWGYFDFNRFHSHWSPRDWQRLINNYWGFRPRSLRVKIFNIQVKEVTVQDSTTTIANNLTSTVQVFTDDDYQLPYVVGNGTEGCLPAFPPQVFTLPQYGYATLNRDNTENPTERSSFFCLEYFPSKMLRTGNNFEFTYNFEEVPFHSSFAPSQNLFKLANPLVDQYLYRFVSTNNTGGVQFNKNLAGRYANTYKNWFPGPMGRTQGWNLGSGVNRASVSAFATTNRMELEGASYQVPPQPNGMTNNLQGSNTYALENTMIFNSQSANPGTTATYLEGNMLITSESETQPVNRVAYNVGGQMATNNQSSTTAPATGTYNLQEIVPGSVWMERDVYLQGPIWAKIPETGAHFHPSPAMGGFGLKHPPPMMLIKNTPVPGNITSFSDVPVSSFITQYSTGQVTVEMEWELKKENSKRWNPEIQYTNNYNDPQFVDFAPDSTGEYRTTRPIGTRYLTRPL

SEQ ID NO: 1186 - DNA, 2203 bp, Artificial Sequence
  source: /note="Description of Artificial Sequence: Synthetic polynucleotide"
atgtcttttgttgatcaccctccagattggttggaagaagttggtgaaggtcttcgcgagtttttgggccttgaagcgggcccaccgaaaccaaaacccaatcagcagcatcaagatcaagcccgtggtcttgtgctgcctggttataactatctcggacccggaaacggtctcgatcgaggagagcctgtcaacagggcagacgaggtcgcgcgagagcacgacatctcgtacaacgagcagcttgaggcgggagacaacccctacctcaagtacaaccacgcggacgccgagtttcaggagaagctcgccgacgacacatccttcgggggaaacctcggaaaggcagtctttcaggccaagaaaagggttctcgaaccttttggcctggttgaagagggtgctaagacggcccctaccggaaagcggatagacgaccactttccaaaaagaaagaaggctcggaccgaagaggactccaagccttccacctcgtcagacgccgaagctggacccagcggatcccagcagctgcaaatcccagcccaaccagcctcaagtttgggagctgatacaatgtctgcgggaggtggcggcccattgggcgacaataaccaaggtgccgatggagtgggcaatgcctcgggagattggcattgcgattccacgtggatgggggacagagtcgtcaccaagtccacccgaacctgggtgctgcccagctacaacaaccaccagtaccgagagatcaaaagcggctccgtcgacggaagcaacgccaacgcctactttggatacagcaccccctgggggtactttgactttaaccgcttccacagccactggagcccccgagactggcaaagactcatcaacaactactggggcttcagaccccggtccctcagagtcaaaatcttcaacattcaagtcaaagaggtcacggtgcaggactccaccaccaccatcgccaacaacctcacctccaccgtccaagtgtttacggacgacgactaccagctgccctacgtcgtcggcaacgggaccgagggatgcctgccggccttccctccgcaggtctttacgctgccgcagtacggttacgcgacgctgaaccgcgacaacacagaaaatcccaccgagaggagcagcttcttctgcctagagtactttcccagcaagatgctgagaacgggcaacaactttgagtttacctacaactttgaggaggtgcccttccactccagcttcgctcccagtcagaacctgttcaagctggccaacccgctggtggaccagtacttgtaccgcttcgtgagcacaaataacactggcggagtccagttcaacaagaacctggccgggagatacgccaacacctacaaaaactggttcccggggcccatgggccgaacccagggctggaacctgggctccggggtcaaccgcgccagtgtcagcgccttcgccacgaccaataggatggagctcgagggcgcgagttaccaggtgcccccgcagccgaacggcatgaccaacaacctccagggcagcaacacctatgccctggagaacactatgatcttcaacagccagggggcgaacccgggcaccaccgccacgtacctcgagggcaacatgctcatcaccagcgagagcgagacgcagccggtgaaccgcgtggcgtacaacgtcggcgggcagatggccaccaacaaccagagctccaccactgcccccgcgaccggcacgtacaacctccaggaaatcgtgcccggcagcgtgtggatggagagggacgtgtacctccaaggacccatctgggccaagatcccagagacgggggcgcactttcacccctctccggccatgggcggattcggactcaaacacccaccgcccatgatgctcatcaagaacacgcctgtgcccggaaatatcaccagcttctcggacgtgcccgtcagcagcttcatcacccagtacagcaccgggcaggtcaccgtggagatggagtgggagctcaagaaggaaaactccaagaggtggaacccagagatccagtacacaaacaactacaacgacccccagtttgtggactttgccccggacagcaccggggaatacagaaccaccagacctatcggaacccgataccttacccgacccctttaacccattcatgtcgcataccctcaataaa

SEQ ID NO: 1187 - protein, 724 aa, Artificial Sequence
  source: /note="Description of Artificial Sequence: Synthetic polypeptide"
MSFVDHPPDWLEEVGEGLREFLGLEAGPPKPKPNQQHQDQARGLVLPGYNYLGPGNGLDRGEPVNRADEVAREHDISYNEQLEAGDNPYLKYNHADAEFQEKLADDTSFGGNLGKAVFQAKKRVLEPFGLVEEGAKTAPTGKRIDDHFPKRKKARTEEDSKPSTSSDAEAGPSGSQQLQIPAQPASSLGADTMSAGGGGPLGDNNQGADGVGNASGDWHCDSTWMGDRVVTKSTRTWVLPSYNNHQYREIKSGSVDGSNANAYFGYSTPWGYFDFNRFHSHWSPRDWQRLINNYWGFRPRSLRVKIFNIQVKEVTVQDSTTTIANNLTSTVQVFTDDDYQLPYVVGNGTEGCLPAFPPQVFTLPQYGYATLNRDNTENPTERSSFFCLEYFPSKMLRTGNNFEFTYNFEEVPFHSSFAPSQNLFKLANPLVDQYLYRFVSTNNTGGVQFNKNLAGRYANTYKNWFPGPMGRTQGWNLGSGVNRASVSAFATTNRMELEGASYQVPPQPNGMTNNLQGSNTYALENTMIFNSQGANPGTTATYLEGNMLITSESETQPVNRVAYNVGGQMATNNQSSTTAPATGTYNLQEIVPGSVWMERDVYLQGPIWAKIPETGAHFHPSPAMGGFGLKHPPPMMLIKNTPVPGNITSFSDVPVSSFITQYSTGQVTVEMEWELKKENSKRWNPEIQYTNNYNDPQFVDFAPDSTGEYRTTRPIGTRYLTRPL

SEQ ID NO: 1188 - DNA, 2194 bp, Artificial Sequence
  source: /note="Description of Artificial Sequence: Synthetic polynucleotide"
atgtcttttgttgatcaccctccagattggttggaagaagttggtgaaggtcttcgcgagtttttgggccttgaagcgggcccaccgaaaccaaaacccaatcagcagcatcaagatcaagcccgtggtcttgtgctgcctggttataactatctcggacccggaaacggtctcgatcgaggagagcctgtcaacagggcagacgaggtcgcgcgagagcacgacatctcgtacaacgagcagcttgaggcgggagacaacccctacctcaagtacaaccacgcggacgccgagtttcaggagaagctcgccgacgacacatccttcgggggaaacctcggaaaggcagtctttcaggccaagaaaagggttctcgaaccttttggcctggttgaagagggtgctaagacggcccctaccggaaagcggatagacgaccactttccaaaaagaaagaaggctcggaccgaagaggactccaagccttccacctcgtcagacgccgaagctggacccagcggatcccagcagctgcaaatcccagcccaaccagcctcaagtttgggagctgatacaatgtctgcgggaggtggcggcccattgggcgacaataaccaaggtgccgatggagtgggcaatgcctcgggagattggcattgcgattccacgtggatgggggacagagtcgtcaccaagtccacccgaacctgggtgctgcccagctacaacaaccaccagtaccgagagatcaaaagcggctccgtcgacggaagcaacgccaacgcctactttggatacagcaccccctgggggtactttgactttaaccgcttccacagccactggagcccccgagactggcaaagactcatcaacaactactggggcttcagaccccggtccctcagagtcaaaatcttcaacattcaagtcaaagaggtcacggtgcaggactccaccaccaccatcgccaacaacctcacctccaccgtccaagtgtttacggacgacgactaccagctgccctacgtcgtcggcaacgggaccgagggatgcctgccggccttccctccgcaggtctttacgctgccgcagtacggttacgcgacgctgaaccgcgacaacacagaaaatcccaccgagaggagcagcttcttctgcctagagtactttcccagcaagatgctgagaacgggcaacaactttgagtttacctacaactttgaggaggtgcccttccactccagcttcgctcccagtcagaacctgttcaagctggccaacccgctggtggaccagtacttgtaccgcttcgtgagcacaaataacactggcggagtccagttcaacaagaacctggccgggagatacgccaacacctacaaaaactggttcccggggcccatgggccgaacccagggctggaacctgggctccggggtcaaccgcgccagtgtcagcgccttcgccacgaccaataggatggagctcgagggcgcgagttaccaggtgcccccgcagccgaacggcatgaccaacaacctccagggcagcaacacctatgccctggagaacactatgatcttcgggaagcaaggctcagagaaaacaaatgtggacattgaaaaggtcatgatcaccagcgagagcgagacgcagccggtgaaccgcgtggcgtacaacgtcggcgggcagatggccaccaacaaccagagctccaccactgcccccgcgaccggcacgtacaacctccaggaaatcgtgcccggcagcgtgtggatggagagggacgtgtacctccaaggacccatctgggccaagatcccagagacgggggcgcactttcacccctctccggccatgggcggattcggactcaaacacccaccgcccatgatgctcatcaagaacacgcctgtgcccggaaatatcaccagcttctcggacgtgcccgtcagcagcttcatcacccagtacagcaccgggcaggtcaccgtggagatggagtgggagctcaagaaggaaaactccaagaggtggaacccagagatccagtacacaaacaactacaacgacccccagtttgtggactttgccccggacagcaccggggaatacagaaccaccagacctatcggaacccgataccttacccgacccctttaacccattcatgtcgcataccctcaataaa

SEQ ID NO: 1189 - protein, 721 aa, Artificial Sequence
  source: /note="Description of Artificial Sequence: Synthetic polypeptide"
MSFVDHPPDWLEEVGEGLREFLGLEAGPPKPKPNQQHQDQARGLVLPGYNYLGPGNGLDRGEPVNRADEVAREHDISYNEQLEAGDNPYLKYNHADAEFQEKLADDTSFGGNLGKAVFQAKKRVLEPFGLVEEGAKTAPTGKRIDDHFPKRKKARTEEDSKPSTSSDAEAGPSGSQQLQIPAQPASSLGADTMSAGGGGPLGDNNQGADGVGNASGDWHCDSTWMGDRVVTKSTRTWVLPSYNNHQYREIKSGSVDGSNANAYFGYSTPWGYFDFNRFHSHWSPRDWQRLINNYWGFRPRSLRVKIFNIQVKEVTVQDSTTTIANNLTSTVQVFTDDDYQLPYVVGNGTEGCLPAFPPQVFTLPQYGYATLNRDNTENPTERSSFFCLEYFPSKMLRTGNNFEFTYNFEEVPFHSSFAPSQNLFKLANPLVDQYLYRFVSTNNTGGVQFNKNLAGRYANTYKNWFPGPMGRTQGWNLGSGVNRASVSAFATTNRMELEGASYQVPPQPNGMTNNLQGSNTYALENTMIFGKQGSEKTNVDIEKVMITSESETQPVNRVAYNVGGQMATNNQSSTTAPATGTYNLQEIVPGSVWMERDVYLQGPIWAKIPETGAHFHPSPAMGGFGLKHPPPMMLIKNTPVPGNITSFSDVPVSSFITQYSTGQVTVEMEWELKKENSKRWNPEIQYTNNYNDPQFVDFAPDSTGEYRTTRPIGTRYLTRPL

SEQ ID NO: 1190 - protein, 519 aa, Artificial Sequence
  source: /note="Description of Artificial Sequence: Synthetic polypeptide"
DGVGSSSGNWHCDSTWLGDRVITTSTRTWALPTYNNHLYKQISNGTSGGATNDNTYFGYSTPWGYFDFNRFHCHFSPRDWQRLINNNWGFRPKRLSFKLFNIQVKEVTQNEGTKTIANNLTSTIQVFTDSEYQLPYVLGSAHQGCLPPFPADVFMIPQYGYLTLNNGSQAVGRSSFYCLEYFPSQMLRTGNNFQFTYTFEDVPFHSSYAHSQSLDRLMNPLIDQYLYYLSRTQTTGGTANTQTLGFSQGGPNTMANQAKNWLPGPCYRQQRVSTTTGQNNNSNFAWTAGTKYHLNGRNSLANPGIAMATHKDDEERFFPSNGILIFGKQNAARDNADYSDVMLTSEEEIKTTNPVATEEYGIVADNLQQQNTAPQIGTVNSQGALPGMVWQNRDVYLQGPIWAKIPHTDGNFHPSPLMGGFGLKHPPPQILIKNTPVPADPPTTFNQSKLNSFITQYSTGQVSVEIEWELQKENSKRWNPEIQYTSNYYKSTSVDFAVNTEGVYSEPRPIGTRYLTRNL

SEQ ID NO: 1191 - protein, 738 aa, Artificial Sequence
  source: /note="Description of Artificial Sequence: Synthetic polypeptide"
MAADGYLPDWLEDNLSEGIREWWALQPGAPKPKANQQHQDNARGLVLPGYKYLGPGNGLDKGEPVNAADAAALEHDKAYDQQLKAGDNPYLKYNHADAEFQERLKEDTSFGGNLGRAVFQAKKRLLEPLGLVEEAAKTAPGKKRPVEPSPQRSPDSSTGIGKKGQQPARKRLNFGQTGDSESVPDPQPLGEPPAAPSGVGPNTMAAGGGAPMADNNEGADGVGSSSGNWHCDSTWLGDRVITTSTRTWALPTYNNHLYKQISNGTSGGATNDNTYFGYSTPWGYFDFNRFHCHFSPRDWQRLINNNWGFRPKRLSFKLFNIQVKEVTQNEGTKTIANNLTSTIQVFTDSEYQLPYVLGSAHQGCLPPFPADVFMIPQYGYLTLNNGSQAVGRSSFYCLEYFPSQMLRTGNNFQFTYTFEDVPFHSSYAHSQSLDRLMNPLIDQYLYYLSRTQTTGGTANTQTLGFSQGGPNTMANQAKNWLPGPCYRQQRVSTTTGQNNNSNFAWTAGTKYHLNGRNSLANPGIAMATHKDDEERFFPSNGILIFGKQNAARDNADYSDVMLTSEEEIKTTNPVATEEYGIVADNLQQQNTAPQIGTVNSQGALPGMVWQNRDVYLQGPIWAKIPHTDGNFHPSPLMGGFGLKHPPPQILIKNTPVPADPPTTFNQSKLNSFITQYSTGQVSVEIEWELQKENSKRWNPEIQYTSNYYKSTSVDFAVNTEGVYSEPRPIGTRYLTRNL

SEQ ID NO: 1192 - protein, 725 aa, Artificial Sequence
  source: /note="Description of Artificial Sequence: Synthetic polypeptide"
MAADGYLPDWLEDNLSEGIREWWALQPGAPKPKANQQHQDNARGLVLPGYKYLGPGNGLDKGEPVNAADAAALEHDKAYDQQLKAGDNPYLKYNHADAEFQERLKEDTSFGGNLGRAVFQAKKRLLEPLGLVEEAAKTAPTGKRIDDHFPKRKKARTEEDSKPSTSSDAEAGPSGSQQLQIPAQPASSLGADTMSAGGGGPLGDNNQGADGVGNASGDWHCDSTWMGDRVVTKSTRTWVLPSYNNHQYREIKSGSVDGSNANAYFGYSTPWGYFDFNRFHSHWSPRDWQRLINNYWGFRPRSLRVKIFNIQVKEVTVQDSTTTIANNLTSTVQVFTDDDYQLPYVVGNGTEGCLPAFPPQVFTLPQYGYATLNRDNTENPTERSSFFCLEYFPSKMLRTGNNFEFTYNFEEVPFHSSFAPSQNLFKLANPLVDQYLYRFVSTNNTGGVQFNKNLAGRYANTYKNWFPGPMGRTQGWNLGSGVNRASVSAFATTNRMELEGASYQVPPQPNGMTNNLQGSNTYALENTMIFNSQPANPGTTATYLEGNMLITSESETQPVNRVAYNVGGQMATNNQSSTTAPATGTYNLQEIVPGSVWMERDVYLQGPIWAKIPETGAHFHPSPAMGGFGLKHPPPMMLIKNTPVPGNITSFSDVPVSSFITQYSTGQVTVEMEWELKKENSKRWNPEIQYTNNYNDPQFVDFAPDSTGEYRTTRPIGTRYLTRPL

SEQ ID NO: 1193 - protein, 736 aa, Artificial Sequence
  source: /note="Description of Artificial Sequence: Synthetic polypeptide"
MAADGYLPDWLEDNLSEGIREWWALKPGAPKPKANQQKQDDGRGLVLPGYKYLGPFNGLDKGEPVNAADAAALEHDKAYDQQLQAGDNPYLRYNHADAEFQERLQEDTSFGGNLGRAVFQAKKRVLEPLGLVEEGAKTAPGKKRPVDQSPQEPDSSSGVGKSGKQPARKRLNFGQTGDSESVPDPQPLGEPPAAPTSLGSNTMASGGGAPMADNNEGADGVGNSSGNWHCDSQWLGDRVITTSTRTWALPTYNNHLYKQISSQSGASNDNHYFGYSTPWGYFDFNRFHCHFSPRDWQRLINNNWGFRPKKLSFKLFNIQVKEVTQNDGTTTIANNLTSTVQVFTDSEYQLPYVLGSAHQGCLPPFPADVFMVPQYGYLTLNNGSQAVGRSSFYCLEYFPSQMLRTGNNFQFSYTFEDVPFHSSYAHSQSLDRLMNPLIDQYLYYLNRTQGTTSGTTNQSRLLFSQAGPQSMSLQARNWLPGPCYRQQRLSKTANDNNNSNFPWTAASKYHLNGRDSLVNPGPAMASHKDDEEKFFPMHGNLIFGKEGTTASNAELDNVMITDEEEIRTTNPVATEQYGTVANNLQSSNTAPTTRTVNDQGALPGMVWQDRDVYLQGPIWAKIPHTDGHFHPSPLMGGFGLKHPPPQIMIKNTPVPANPPTTFSPAKFASFITQYSTGQVSVEIEWELQKENSKRWNPEIQYTSNYNKSVNVDFTVDTNGVYSEPRPIGTRYLTRNL

SEQ ID NO: 1194 - protein, 735 aa, Artificial Sequence
  source: /note="Description of Artificial Sequence: Synthetic polypeptide"
MSFVDHPPDWLEEVGEGLREFLGLEAGPPKPKPNQQHQDQARGLVLPGYNYLGPGNGLDRGEPVNRADEVAREHDISYNEQLEAGDNPYLKYNHADAEFQEKLADDTSFGGNLGKAVFQAKKRVLEPFGLVEEGAKTAPGKKRPVDQSPQEPDSSSGVGKSGKQPARKRLNFGQTGDSESVPDPQPLGEPPAAPTSLGSNTMASGGGAPMADNNEGADGVGNSSGNWHCDSQWLGDRVITTSTRTWALPTYNNHLYKQISSQSGASNDNHYFGYSTPWGYFDFNRFHCHFSPRDWQRLINNNWGFRPKKLSFKLFNIQVKEVTQNDGTTTIANNLTSTVQVFTDSEYQLPYVLGSAHQGCLPPFPADVFMVPQYGYLTLNNGSQAVGRSSFYCLEYFPSQMLRTGNNFQFSYTFEDVPFHSSYAHSQSLDRLMNPLIDQYLYYLNRTQGTTSGTTNQSRLLFSQAGPQSMSLQARNWLPGPCYRQQRLSKTANDNNNSNFPWTAASKYHLNGRDSLVNPGPAMASHKDDEEKFFPMHGNLIFGKEGTTASNAELDNVMITDEEEIRTTNPVATEQYGTVANNLQSSNTAPTTRTVNDQGALPGMVWQDRDVYLQGPIWAKIPHTDGHFHPSPLMGGFGLKHPPPQIMIKNTPVPANPPTTFSPAKFASFITQYSTGQVSVEIEWELQKENSKRWNPEIQYTSNYNKSVNVDFTVDTNGVYSEPRPIGTRYLTRPL

SEQ ID NO: 1195 - protein, 736 aa, Artificial Sequence
  source: /note="Description of Artificial Sequence: Synthetic polypeptide"
MAADGYLPDWLEDNLSEGIREWWALKPGAPKPKANQQKQDDGRGLVLPGYKYLGPFNGLDKGEPVNAADAAALEHDKAYDQQLQAGDNPYLRYNHADAEFQERLQEDTSFGGNLGRAVFQAKKRVLEPLGLVEEGAKTAPGKKRPVEPSPQRSPDSSTGIGKKGQQPARKRLNFGQTGDSESVPDPQPLGEPPAAPSGVGPNTMAAGGGAPMADNNEGADGVGSSSGNWHCDSTWLGDRVITTSTRTWALPTYNNHLYKQISSQSGASNDNHYFGYSTPWGYFDFNRFHCHFSPRDWQRLINNNWGFRPKRLSFKLFNIQVKEVTQNEGTKTIANNLTSTIQVFTDSEYQLPYVLGSAHQGCLPPFPADVFMIPQYGYLTLNNGSQAVGRSSFYCLEYFPSQMLRTGNNFQFTYTFEDVPFHSSYAHSQSLDRLMNPLIDQYLYYLSRTQTTGGTANTQTLGFSQGGPNTMANQAKNWLPGPCYRQQRVSTTTGQNNNSNFAWTAGTKYHLNGRNSLANPGIAMATHKDDEERFFPSNGILIFGKQGTTASNAELDNVMITDEEEIKTTNPVATEEYGIVADNLQQQNTAPQIGTVNSQGALPGMVWQNRDVYLQGPIWAKIPHTDGNFHPSPLMGGFGLKHPPPQILIKNTPVPADPPTTFNQSKLNSFITQYSTGQVSVEIEWELQKENSKRWNPEIQYTSNYNKSVNVDFTVDTNGVYSEPRPIGTRYLTRNL

SEQ ID NO: 1196 - protein, 736 aa, Artificial Sequence
  source: /note="Description of Artificial Sequence: Synthetic polypeptide"
MAADGYLPDWLEDNLSEGIREWWALKPGAPKPKANQQKQDDGRGLVLPGYKYLGPFNGLDKGEPVNAADAAALEHDKAYDQQLQAGDNPYLRYNHADAEFQERLQEDTSFGGNLGRAVFQAKKRVLEPLGLVEEGAKTAPGKKRPVEPSPQRSPDSSTGIGKKGQQPARKRLNFGQTGDSESVPDPQPLGEPPAAPSGVGPNTMAAGGGAPMADNNEGADGVGSSSGNWHCDSTWLGDRVITTSTRTWALPTYNNHLYKQISSQSGASNDNHYFGYSTPWGYFDFNRFHCHFSPRDWQRLINNNWGFRPKRLSFKLFNIQVKEVTQNEGTKTIANNLTSTIQVFTDSEYQLPYVLGSAHQGCLPPFPADVFMIPQYGYLTLNNGSQAVGRSSFYCLEYFPSQMLRTGNNFQFTYTFEDVPFHSSYAHSQSLDRLMNPLIDQYLYYLSRTQTTGGTANTQTLGFSQGGPNTMANQAKNWLPGPCYRQQRVSTTTGQNNNSNFAWTAGTKYHLNGRNSLANPGIAMATHKDDEERFFPSNGILIFGKQNAARDNADYSDVMLTSEEEIKTTNPVATEEYGIVADNLQQQNTAPQIGTVNSQGALPGMVWQNRDVYLQGPIWAKIPHTDGNFHPSPLMGGFGLKHPPPQILIKNTPVPADPPTTFNQSKLNSFITQYSTGQVSVEIEWELQKENSKRWNPEIQYTSNYYKSTSVDFAVNTEGVYSEPRPIGTRYLTRNL

SEQ ID NO: 1197 - protein, 736 aa, Artificial Sequence
  source: /note="Description of Artificial Sequence: Synthetic polypeptide"
MAADGYLPDWLEDNLSEGIREWWDLKPGAPKPKANQQKQDDGRGLVLPGYKYLGPFNGLDKGEPVNAADAAALEHDKAYDQQLKAGDNPYLRYNHADAEFQERLQEDTSFGGNLGRAVFQAKKRVLEPLGLVEEGAKTAPGKKRPVEQSPQEPDSSSGIGKTGQQPAKKRLNFGQTGDTESVPDPQPLGEPPAAPSGLGPNTMASGGGAPMADNNEGADGVGNSSGNWHCDSTWLGDRVITTSTRTWALPTYNNHLYKQISNGTSGGSTNDNTYFGYSTPWGYFDFNRFHCHFSPRDWQRLINNNWGFRPKRLNFKLFNIQVKEVTTNEGTKTIANNLTSTVQVFTDSEYQLPYVLGSAHQGCLPPFPADVFMVPQYGYLTLNNGSQALGRSSFYCLEYFPSQMLRTGNNFQFSYTFEDVPFHSSYAHSQSLDRLMNPLIDQYLYYLVRTQTTGTGGTQTLAFSQAGPSSMASQARNWVPGPSYRQQRVSTTTNQNNNSNFAWTGAAKFKLNGRDSLMNPGVAMASHKDDEDRFFPSSGVLIFGKQGAGNDGVDYSQVLITDEEEIKATNPVATEEYGAVAINNQAANTQAQTGLVHNQGVIPGMVWQNRDVYLQGPIWAKIPHTDGNFHPSPLMGGFGLKHPPPQILIKNTPVPADPPLTFNQAKLNSFITQYSTGQVSVEIEWELQKENSKRWNPEIQYTSNYYKSTNVDFAVNTEGVYSEPRPIGTRYLTRNL

SEQ ID NO: 1198 - DNA, 3695 bp, Artificial Sequence
  source: /note="Description of Artificial Sequence: Synthetic polynucleotide"
ctctttgcgcttgcgttttcccttgtccagatagcccagtagctgacattcatccggggtcagcaccgtttctgcggactggctttctacgtgaaaaggatctaggtgaagatcctttttgataatctcatgcctgacatttatattccccagaacatcaggttaatggcgtttttgatgtcattttcgcggtggctgagatcagccacttcttccccgataacggagaccggcacactggccatatcggtggtcatcatgcgccagctttcatccccgatatgcaccaccgggtaaagttcacgggagactttatctgacagcagacgtgcactggccagggggatcaccatccgtcgccccggcgtgtcaataatatcactctgtacatccacaaacagacgataacggctctctcttttataggtgtaaaccttaaactgccgtacgtataggctgcgcaactgttgggaagggcgatcggtgcgggcctcttcgctattacgccagctggcgaaagggggatgtgctgcaaggcgattaagttgggtaacgccagggttttcccagtcacgacgttgtaaaacgacggccagtgaattgtaatacgactcactatagggcgaattgaatttagcggccgcgaattcgcccttatgatatctggtgggaggagggcaagatgacggccaaggtcgtggagtccgccaaggccattctcggcggcagcaaagtgcgcgtggaccaaaagtgcaagtcgtccgcccagatcgatcccactcccgtcattgtcacctccaacaccaacatgtgcgccgtgattgacgggaacagcaccaccttcgagcaccagcagccgttgcaggaccggatgttcaaatttgaacttacccgccgtctggagcatgactttggcaaggtgacaaagcaggaagtcaaagagttcttccgctgggcgcaggatcacgtgaccgaggtggcgcatgagttccacgtcagaaagggtggagccaacaagagacccgcccccgatgacgctgataaaagcgagcccaagcgggcctgcccctcagtcgcagatccatcgacgtcagacgcggaaggagctccggtggactttgccgacaggtaccaaaacaaatgttctcgtcacgcgggcatgcttcagatgctgtttccctgcaagacatgcgagagaatgaatcagaatttcaacatttgcttcacgcacgggaccagggactgttcggagtgcttccccggcgtgtcagaatctcaaccggtcgtcagaaaaaggacgtatcggaaactctgtgccattcatcatctgctggggagggctcccgagattgcttgctcggcctgcgatctggtcaacgtggacctggatgactgtgtctctgagcaataaatgacttaaaccaggtatggctgccgatggttatcttccagattggctcgaggacaacctctctgagggcattcgcgagtggtgggacttgaaacctggagccccgaaacccaaagccaaccagcaaaagcaggacgacggccggggtctggtgcttcctggctacaagtacctcggacccttcaacggactcgacaagggggagcccgtcaacgcggcggacgcagcggccctcgagcacgacaaggcctacgaccagcagctcaaagcgggtgacaatccgtacctgcggtataaccacgccgacgccgagtttcaggagcgtctgcaagaagatacgtcttttgggggcaacctcgggcgagcagtcttccaggccaagaagcgggttctcgaacctctcggtctggttgaggaaggcgctaagacggctcctggaaagaagagaccggtagagcagtcaccccaagaaccagactcctcatcgggcatcggcaagacaggccagcagcccgctaaaaagagactcaattttggtcagactggcgacacagagtcagtccccgacccacaacctctcggagaacctccagcagccccctcaggtctgggacctaatacaatggcttcaggcggtggcgctccaatggcagacaataacgaaggcgccgacggagtgggtaattcctcgggaaattggcattgcgattccacatggctgggggacagagtcatcaccaccagcacccgaacctgggccctgcccacctacaacaaccacctctacaagcaaatctccaacggcacctcgggaggaagcaccaacgacaacacctactttggctacagcaccccctgggggtattttgacttcaacagattccactgccacttttcaccacgtgactggcagcgactcatcaacaacaattggggattccggcccaagagactcaacttcaagctcttcaacatccaggtcaaggaagtcacgacgaacgaaggcaccaagaccatcgccaataatctcaccagcaccgtgcaggtctttacggactcggagtaccagctaccgtacgtgctaggatcagctcaccagggatgtctgcctccgttcccggcggacgtcttcatggttcctcagtacggttatctaactctgaacaatggcagccaggccctgggacgttcctccttctactgcctggagtatttcccatcgcagatgctgagaaccggcaacaactttcagttcagctacaccttcgaggacgtgcctttccacagcagctacgcgcacagccaaagcctggacaggctgatgaatcccctcatcgaccagtacctgtattacctggtcagaacgcagacaaccgggactggagggacgcagactctggcattcagccaagcaggccctagctcaatggccagccaggctagaaactgggtgcccggaccgagctaccggcagcagcgcgtctccacgacaaccaaccagaacaacaacagcaactttgcctggacgggagctgccaaatttaaactgaacggccgagactctctaatgaaccccggcgtggccatggcttcacacaaggatgacgaggaccgcttcttcccttctagcggggtcctgattttcggcaagcaaggagccgggaatgatggagtggattacagccaagtgctgattacagatgaggaagaaatcaaggctaccaaccccgtggcaacagaggaatatggagcagtggccatcaacaaccaggccgctaatacgcaggcgcagaccggactcgtgcacaaccagggggtgattcccggcatggtgtggcagaacagagacgtgtacctgcagggtcccatctgggccaaaattcctcacacggacggcaactttcacccgtctcccctgatgggcggctttggactgaagcacccgcctcctcaaattctcatcaagaacacaccggttccagcggacccgccgcttaccttcaaccaggccaagctgaactctttcatcacgcagtacagcaccggacaggtcagcgtggaaatcgagtgggagctgcagaaagaaaacagcaaacgctggaatccagagattcagtacacttccaactactacaaatctacaaatgtggactttgctgtcaacacggaaggagtgtatagcgagcctcgccccattggcacccgttacctcacccgcaacctgtaattgcctgttaatcaataaaccggttaattcgtttcagtaaggaagaattcgtttaaa

SEQ ID NO: 1199 - protein, 736 aa, Artificial Sequence; identical to SEQ ID NO: 518
  source: /note="Description of Artificial Sequence: Synthetic polypeptide"

SEQ ID NO: 1200 - protein, 736 aa, Artificial Sequence
  source: /note="Description of Artificial Sequence: Synthetic polypeptide"
MAADGYLPDWLEDNLSEGIREWWDLKPGAPKPKANQQKQDDGRGLVLPGYKYLGPFNGLDKGEPVNAADAAALEHDKAYDQQLKAGDNPYLRYNHADAEFQERLQEDTSFGGNLGRAVFQAKKRVLEPLGLVEEGAKTAPGKKRPVEQSPQEPDSSSGIGKTGQQPAKKRLNFGQTGDTESVPDPQPLGEPPAAPSGLGPNTMASGGGAPMADNNEGADGVGNSSGNWHCDSTWLGDRVITTSTRTWALPTYNNHLYKQISNGTSGGSTNDNTYFGYSTPWGYFDFNRFHCHFSPRDWQRLINNNWGFRPKRLNFKLFNIQVKEVTTNEGTKTIANNLTSTVQVFTDSEYQLPYVLGSAHQGCLPPFPADVFMVPQYGYLTLNNGSQALGRSSFYCLEYFPSQMLRTGNNFQFSYTFEDVPFHSSYAHSQSLDRLMNPLIDQYLYYLVRTQTTGTGGTQTLAFSQAGPSNMASQARNWVPGPSYRQQRVSTTTNQNNNSNFAWTGAAKFKLNGRDSLMNPGVAMASHKDDEDRFFPSSGVLIFGKQGAGNDGVDYSQVLITDEEEIKATNPVATEEYGAVAINNQAANTQAQTGLVHNQGVIPGMVWQNRDVYLQGPIWAKIPHTDGNFHPSPLMGGFGLKHPPPQILIKNTPVPADPPLTFNQAKLNSFITQYSTGQVSVEIEWELQKENSKRWNPEIQYTSNYYKSTNVDFAVNTEGVYSEPRPIGTRYLTRNL

SEQ ID NO: 1201 - protein, 738 aa, Artificial Sequence; identical to SEQ ID NO: 895
  source: /note="Description of Artificial Sequence: Synthetic polypeptide"

SEQ ID NO: 1202 - protein, 736 aa, Artificial Sequence
  source: /note="Description of Artificial Sequence: Synthetic polypeptide"
MAADGYLPDWLEDNLSEGIREWWALQPGAPKPKANQQHQDNARGLVLPGYKYLGPGNGLDKGEPVNAADAAALEHDKAYDQQLKAGDNPYLKYNHADAEFQERLKEDTSFGGNLGRAVFQAKKRILEPLGLVEEAAKTAPGKKRPVDQSPQEPDSSSGVGKSGKQPARKRLNFGQTGDSESVPDPQPLGEPPAAPTSLGSNTMASGGGAPMADNNEGADGVGNSSGNWHCDSQWLGDRVITTSTRTWALPTYNNHLYKQISSQSGASNDNHYFGYSTPWGYFDFNRFHCHFSPRDWQRLINNNWGFRPKKLSFKLFNIQVKEVTQNDGTTTIANNLTSTVQVFTDSEYQLPYVLGSAHQGCLPPFPADVFMVPQYGYLTLNNGSQAVGRSSFYCLEYFPSQMLRTGNNFQFSYTFEDVPFHSSYAHSQSLDRLMNPLIDQYLYYLNRTQGTTSGTTNQSRLLFSQAGPQSMSLQARNWLPGPCYRQQRLSKTANDNNNSNFPWTAASKYHLNGRDSLVNPGPAMASHKDDEEKFFPMHGNLIFGKEGTTASNAELDNVMITDEEEIRTTNPVATEQYGTVANNLQSSNTAPTTRTVNDQGALPGMVWQDRDVYLQGPIWAKIPHTDGHFHPSPLMGGFGLKHPPPQIMIKNTPVPANPPTTFSPAKFASFITQYSTGQVSVEIEWELQKENSKRWNPEIQYTSNYNKSVNVDFTVDTNGVYSEPRPIGTRYLTRPL

SEQ ID NO: 1203 - protein, 736 aa, Artificial Sequence
  source: /note="Description of Artificial Sequence: Synthetic polypeptide"
MAADGYLPDWLEDNLSEGIREWWALQPGAPKPKANQQHQDNARGLVLPGYKYLGPGNGLDKGEPVNAADAAALEHDKAYDQQLKAGDNPYLKYNHADAEFQERLKEDTSFGGNLGRAVFQAKKRLLEPLGLVEEAAKTAPGKKRPVDQSPQEPDSSSGVGKSGKQPARKRLNFGQTGDSESVPDPQPLGEPPAAPTSLGSNTMASGGGAPMADNNEGADGVGNSSGNWHCDSQWLGDRVITTSTRTWALPTYNNHLYKQISSQSGASNDNHYFGYSTPWGYFDFNRFHCHFSPRDWQRLINNNWGFRPKKLSFKLFNIQVKEVTQNDGTTTIANNLTSTVQVFTDSEYQLPYVLGSAHQGCLPPFPADVFMVPQYGYLTLNNGSQAVGRSSFYCLEYFPSQMLRTGNNFQFSYTFEDVPFHSSYAHSQSLDRLMNPLIDQYLYYLNRTQGTTSGTTNQSRLLFSQAGPQSMSLQARNWLPGPCYRQQRLSKVANDNNNSNFPWTAASKYHLNGRDSLVNPGPAMASHKDDEEKFFPMHGNLIFGKEGTTASNAELDNVMITDEEEIRTTNPVATEQYGTVANNLQSSNTAPTTRTVNDQGALPGMVWQDRDVYLQGPIWAKIPHTDGHFHPSPLMGGFGLKHPPPQIMIKNTPVPANPPTTFVPAKFASFITQYSTGQVSVEIEWELQKENSKRWNPEIQYTSNYNKSVNVDFTVDTNGVYSEPRPIGTRYLTRPL

SEQ ID NO: 1204 - protein, 736 aa, Artificial Sequence; identical to SEQ ID NO: 912
  source: /note="Description of Artificial Sequence: Synthetic polypeptide"
  VARIANT (168)..(168): /replace="Arg"
  VARIANT (204)..(204): /replace="Ser"
  VARIANT (266)..(266): /replace="Gly"
  VARIANT (311)..(311): /replace="Lys"
  VARIANT (411)..(411): /replace="Gln"
  VARIANT (460)..(460): /replace="Glu"
  VARIANT (493)..(493): /replace="Thr"
  VARIANT (562)..(562): /replace="Asn"
  VARIANT (576)..(576): /replace="Glu"
  VARIANT (587)..(587): /replace="Ala"
  VARIANT (609)..(609): /replace="Asp
  SITE (1)..(736): /note="Variant residues given in the sequence have no preference with respect to those in the annotations for variant positions"

SEQ ID NO: 1205 - DNA, 2208 bp, Artificial Sequence; identical to SEQ ID NO: 913
  source: /note="Description of Artificial Sequence: Synthetic polynucleotide"
  variation (502)..(504): /replace="aaa"
  variation (610)..(612): /replace="agc"
  variation (796)..(798): /replace="ggc"
  variation (931)..(933): /replace="aag"
  variation (1231)..(1233): /replace="cag"
  variation (1378)..(1380): /replace="gag"
  variation (1477)..(1479): /replace="acc"
  variation (1684)..(1686): /replace="aac"
  variation (1726)..(1728): /replace="gag"
  variation (1759)..(1761): /replace="gcc"
  variation (1825)..(1827): /replace="gac"
  misc_feature (1)..(2208): /note="Variant residues given in the sequence have no preference with respect to those in the annotations for variant positions"

SEQ ID NO: 1206 - protein, 737 aa, Artificial Sequence
  source: /note="Description of Artificial Sequence: Synthetic polypeptide"
  VARIANT (157)..(157): /replace="Ser"
  VARIANT (168)..(168): /replace="Arg"
  VARIANT (262)..(262): /replace="Ser"
  VARIANT (263)..(263): /replace="His"
  VARIANT (312)..(312): /replace="Lys"
  VARIANT (412)..(412): /replace="Gln"
  VARIANT (460)..(460): /replace="Gln"
  VARIANT (461)..(461): /replace="Glu"
  VARIANT (552)..(552): /replace="Ser"
  VARIANT (556)..(556): /replace="Tyr"
  VARIANT (557)..(557): /replace="Ser"
  VARIANT (563)..(563): /replace="Asn"
  VARIANT (580)..(580): /replace="Ile"
  VARIANT (588)..(588): /replace="Ser"
  VARIANT (664)..(664): /replace="Thr
  SITE (1)..(737): /note="Variant residues given in the sequence have no preference with respect to those in the annotations for variant positions"
MAADGYLPDWLEDNLSEGIREWWDLKPGAPKPKANQQKQDDGRGLVLPGYKYLGPFNGLDKGEPVNAADAAALEHDKAYDQQLKAGDNPYLRYNHADAEFQERLQEDTSFGGNLGRAVFQAKKRVLEPLGLVEEGAKTAPGKKRPVEQSPQEPDSSTGIGKKGQQPAKKRLNFGQTGDSESVPDPQPLGEPPAAPSGVGSNTMAAGGGAPMADNNEGADGVGNASGNWHCDSTWLGDRVITTSTRTWALPTYNNHLYKQISNSQSGGSTNDNTYFGYSTPWGYFDFNRFHCHFSPRDWQRLINNNWGFRPKRLNFKLFNIQVKEVTTNDGTTTIANNLTSTVQVFTDSEYQLPYVLGSAHQGCLPPFPADVFMIPQYGYLTLNNGSQAVGRSSFYCLEYFPSQMLRTGNNFEFSYTFEDVPFHSSYAHSQSLDRLMNPLIDQYLYYLSRTQTTGGTAGNRTLQFSQAGPSSMANQAKNWLPGPCYRQQRVSKTTNQNNNSNFAWTGATKYHLNGRDSLVNPGVAMATHKDDEDRFFPSSGVLIFGKQGAGNDNVDLDNVMITSEEEIKTTNPVATEEYGVVATNLQSNNTAPQTGTVNSQGALPGMVWQNRDVYLQGPIWAKIPHTDGNFHPSPLMGGFGLKHPPPQILIKNTPVPANPPTTFSPAKFASFITQYSTGQVSVEIEWELQKENSKRWNPEIQYTSNYNKSTNVDFAVDTEGVYSEPRPIGTRYLTRNL

SEQ ID NO: 1207 - DNA, 2211 bp, Artificial Sequence; identical to SEQ ID NO: 915
  source: /note="Description of Artificial Sequence: Synthetic polynucleotide"
  variation (469)..(471): /replace="agc"
  variation (502)..(504): /replace="aag"
  variation (784)..(786): /replace="agt"
  variation (787)..(789): /replace="cac"
  variation (934)..(936): /replace="aag"
  variation (1234)..(1236): /replace="cag"
  variation (1378)..(1380): /replace="cag"
  variation (1381)..(1383): /replace="gag"
  variation (1654)..(1656): /replace="agc"
  variation (1666)..(1668): /replace="tac"
  variation (1669)..(1671): /replace="agc"
  variation (1687)..(1689): /replace="aac"
  variation (1738)..(1740): /replace="atc"
  variation (1762)..(1764): /replace="agc"
  variation (1990)..(1992): /replace="acc"
  misc_feature (1)..(2211): /note="Variant residues given in the sequence have no preference with respect to those in the annotations for variant positions"

SEQ ID NO: 1208 - protein, 738 aa, Artificial Sequence; identical to SEQ ID NO: 916
  source: /note="Description of Artificial Sequence: Synthetic polypeptide"
  VARIANT (158)..(158): /replace="Ser"
  VARIANT (169)..(169): /replace="Arg"
  VARIANT (564)..(564): /replace="Asn
  SITE (1)..(738): /note="Variant residues given in the sequence have no preference with respect to those in the annotations for variant positions"

SEQ ID NO: 1209 - DNA, 2214 bp, Artificial Sequence; identical to SEQ ID NO: 917
  source: /note="Description of Artificial Sequence: Synthetic polynucleotide"
  variation (472)..(474): /replace="agc"
  variation (505)..(507): /replace="aga"
  variation (1690)..(1692): /replace="aac"
  misc_feature (1)..(2214): /note="Variant residues given in the sequence have no preference with respect to those in the annotations for variant positions"

SEQ ID NO: 1210 - protein, 738 aa, Artificial Sequence; identical to SEQ ID NO: 918
  source: /note="Description of Artificial Sequence: Synthetic polypeptide"
  VARIANT (158)..(158): /replace="Ser"
  VARIANT (169)..(169): /replace="Lys"
  VARIANT (315)..(315): /replace="Ser"
  VARIANT (413)..(413): /replace="Glu"
  VARIANT (472)..(472): /replace="Thr" or "Ser"
  VARIANT (534)..(534): /replace="Glu"
  VARIANT (542)..(542): /replace="Val"
  VARIANT (595)..(595): /replace="Val
  SITE (1)..(738): /note="Variant residues given in the sequence have no preference with respect to those in the annotations for variant positions"

SEQ ID NO: 1211 - DNA, 2214 bp, Artificial Sequence
  source: /note="Description of Artificial Sequence: Synthetic polynucleotide"
  variation (472)..(474): /replace="agc"
  variation (505)..(507): /replace="aag"
  variation (943)..(945): /replace="agc"
  variation (1237)..(1239): /replace="gaa"
  variation (1414)..(1416): /replace="acc" or "agc"
  variation (1600)..(1602): /replace="gag"
  variation (1624)..(1626): /replace="gtc"
  variation (1783)..(1785): /replace="gta"
  misc_feature (1)..(2214): /note="Variant residues given in the sequence have no preference with respect to those in the annotations for variant positions"
atggctgccgatggttatcttccagattggctcgaggacaacctctctgagggcattcgcgagtggtgggacctgaaacctggagccccgaaacccaaagccaaccagcaaaagcaggacgacggccggggtctggtgcttcctggctacaagtacctcggacccttcaacggactcgacaagggggagcccgtcaacgcggcggacgcagcggccctcgagcacgacaaggcctacgaccagcagctcaaagcgggtgacaatccgtacctgcggtataatcacgccgacgccgagtttcaggagcgtctgcaagaagatacgtcttttgggggcaacctcgggcgagcagtcttccaggccaagaagcgggttctcgaacctctcggtctggttgaggaaggcgctaagacggctcctggaaagaagagaccggtagagcagtcaccacagcgtgagcccgactcctccacgggcatcggcaagaaaggccagcagcccgccagaaagagactcaatttcggtcagactggcgactcagagtcagtccccgaccctcaacctctcggagaacctccagcagcgccctctggtgtgggatctaatacaatggctgcaggcggtggcgcaccaatggcagacaataacgaaggtgccgacggagtgggtagttcctcgggaaattggcattgcgattccacatggctgggcgacagagtcatcaccaccagcacccgaacctgggccctgcccacctacaacaaccacctctacaagcaaatctccaacgggacctcgggaggcagcaccaacgacaacacctactttggctacagcaccccctgggggtattttgactttaacagattccactgccacttctcaccacgtgactggcagcgactcatcaacaacaactggggattccggcccaagagactcaacttcaagctcttcaacatccaggtcaaagaggtcacgcagaatgaaggcaccaagaccatcgccaataacctcaccagcaccatccaggtgtttacggactcggaataccagctgccgtacgtcctcggctctgcccaccagggctgcctgcctccgttcccggcggacgtcttcatgattcctcagtacggctacctgactctcaacaacggtagtcaggccgtgggacgttcctccttctactgcctggagtacttcccctctcagatgctgagaacgggcaacaactttcaattcagctacactttcgaggacgtgcctttccacagcagctacgcgcacagccagagtttggacaggctgatgaatcctctcatcgaccagtacctgtactacctgtcaagaacccagactacgggaggcacagcgggaacccagacgttgcagttttctcaggccgggcctagcaacatggcgaatcaggccaaaaactggctgcctggaccctgctacagacagcagcgcgtctccacgacaacgtcgcaaaacaacaacagcaactttgcctggactggtgccaccaagtatcatctgaacggcagagactctctggtgaatccgggcgtcgccatggcaacccacaaggacgacgaggaccgcttcttcccatccagcggcatcctcatatttggcaagcagggagctggaaaagacaacgtggactatagcaacgtgatgctaaccagcgaggaagaaatcaagaccaccaaccccgtggccacagaagagtatggcgtggtggctgataacctacagcagcaaaacaccgctcctcaaatagggaccgtcaacagccagggagccttacctggcatggtctggcagaaccgggacgtgtacctgcagggtcctatttgggccaagattcctcacacagatggcaactttcacccgtctcctttaatgggcggctttggacttaaacatccgcctcctcagatcctcatcaaaaacactcctgttcctgcggatcctccaacaacgttcaaccaggccaagctgaattctttcatcacgcagtacagcaccggacaagtcagcgtggagatcgagtgggagctgcagaaggagaacagcaagcgctggaacccagagattcagtatacttccaactactacaaatctacaaatgtggactttgctgttaatactgagggtgtttactctgagcctcgccccattggcactcgttacctcacccgtaatctg

SEQ ID NO: 1212 - protein, 738 aa, Artificial Sequence; identical to SEQ ID NO: 920
  source: /note="Description of Artificial Sequence: Synthetic polypeptide"
  VARIANT (169)..(169): /replace="Lys"
  VARIANT (315)..(315): /replace="Ser"
  VARIANT (534)..(534): /replace="Glu"
  VARIANT (542)..(542): /replace="Val
  SITE (1)..(738): /note="Variant residues given in the sequence have no preference with respect to those in the annotations for variant positions"

SEQ ID NO: 1213 - DNA, 2214 bp, Artificial Sequence; identical to SEQ ID NO: 921
  source: /note="Description of Artificial Sequence: Synthetic polynucleotide"
  variation (505)..(507): /replace="aaa"
  variation (943)..(945): /replace="agc"
  variation (1600)..(1602): /replace="gag"
  variation (1624)..(1626): /replace="gtc"
  misc_feature (1)..(2214): /note="Variant residues given in the sequence have no preference with respect to those in the annotations for variant positions"

SEQ ID NO: 1214 - protein, 738 aa, Artificial Sequence; identical to SEQ ID NO: 922
  source: /note="Description of Artificial Sequence: Synthetic polypeptide"
  VARIANT (471)..(471): /replace="Asn
  SITE (1)..(738): /note="Variant residues given in the sequence have no preference with respect to those in the annotations for variant positions"

SEQ ID NO: 1215 - DNA, 2214 bp, Artificial Sequence; identical to SEQ ID NO: 923
  source: /note="Description of Artificial Sequence: Synthetic polynucleotide"
  variation (1411)..(1413): /replace="aat"
  misc_feature (1)..(2214): /note="Variant residues given in the sequence have no preference with respect to those in the annotations for variant positions"

SEQ ID NO: 1216 - protein, 737 aa, Artificial Sequence; identical to SEQ ID NO: 924
  source: /note="Description of Artificial Sequence: Synthetic polypeptide"
  VARIANT (148)..(148): /replace="Gln"
  VARIANT (169)..(169): /replace="Arg"
  VARIANT (314)..(314): /replace="Asn"
  VARIANT (466)..(466): /replace="His"
  VARIANT (563)..(563): /replace="Ser"
  VARIANT (580)..(580): /replace="Ile"
  VARIANT (588)..(588): /replace="Ser
  SITE (1)..(737): /note="Variant residues given in the sequence have no preference with respect to those in the annotations for variant positions"

SEQ ID NO: 1217 - DNA, 2211 bp, Artificial Sequence; identical to SEQ ID NO: 925
  source: /note="Description of Artificial Sequence: Synthetic polynucleotide"
  variation (442)..(444): /replace="cag"
  variation (505)..(507): /replace="aga"
  variation (940)..(942): /replace="aac"
  variation (1396)..(1398): /replace="cac"
  variation (1687)..(1689): /replace="agt"
  variation (1738)..(1740): /replace="ata"
  variation (1762)..(1764): /replace="tct"
  misc_feature (1)..(2211): /note="Variant residues given in the sequence have no preference with respect to those in the annotations for variant positions"

SEQ ID NO: 1218 - protein, 735 aa, Artificial Sequence; identical to SEQ ID NO: 926
  source: /note="Description of Artificial Sequence: Synthetic polypeptide"
  VARIANT (162)..(162): /replace="Thr"
  VARIANT (168)..(168): /replace="Arg"
  VARIANT (224)..(224): /replace="Ser"
  VARIANT (310)..(310): /replace="Lys"
  VARIANT (410)..(410): /replace="Gln"
  VARIANT (446)..(446): /replace="Asn"
  VARIANT (461)..(461): /replace="Leu"
  VARIANT (471)..(471): /replace="Ser"
  VARIANT (708)..(708): /replace="Thr
  SITE (1)..(735): /note="Variant residues given in the sequence have no preference with respect to those in the annotations for variant positions"

SEQ ID NO: 1219 - DNA, 2205 bp, Artificial Sequence; identical to SEQ ID NO: 927
  source: /note="Description of Artificial Sequence: Synthetic polynucleotide"
  variation (484)..(486): /replace="aca"
  variation (502)..(504): /replace="aga"
  variation (670)..(672): /replace="tcc"
  variation (928)..(930): /replace="aaa"
  variation (1228)..(1230): /replace="cag"
  variation (1336)..(1338): /replace="aac"
  variation (1381)..(1383): /replace="ctg"
  variation (1411)..(1413): /replace="tct"
  variation (2122)..(2124): /replace="acc"
  misc_feature (1)..(2205): /note="Variant residues given in the sequence have no preference with respect to those in the annotations for variant positions"

SEQ ID NO: 1220 - protein, 735 aa, Artificial Sequence; identical to SEQ ID NO: 928
  source: /note="Description of Artificial Sequence: Synthetic polypeptide"
  VARIANT (42)..(42): /replace="Ser"
  VARIANT (168)..(168): /replace="Lys"
  VARIANT (310)..(310): /replace="Arg"
  VARIANT (410)..(410): /replace="Gln"
  VARIANT (446)..(446): /replace="Arg"
  VARIANT (461)..(461): /replace="Leu"
  VARIANT (471)..(471): /replace="Ser"
  VARIANT (475)..(475): /replace="Arg"
  VARIANT (504)..(504): /replace="Ala"
  VARIANT (539)..(539): /replace="Asn
  SITE (1)..(735): /note="Variant residues given in the sequence have no preference with respect to those in the annotations for variant positions"

SEQ ID NO: 1221 - DNA, 2205 bp, Artificial Sequence; identical to SEQ ID NO: 929
  source: /note="Description of Artificial Sequence: Synthetic polynucleotide"
  variation (124)..(126): /replace="agt"
  variation (502)..(504): /replace="aaa"
  variation (928)..(930): /replace="aga"
  variation (1228)..(1230): /replace="cag"
  variation (1336)..(1338): /replace="aga"
  variation (1381)..(1383): /replace="ctc"
  variation (1411)..(1413): /replace="tct"
  variation (1423)..(1425): /replace="aga"
  variation (1510)..(1512): /replace="gcg"
  variation (1615)..(1617): /replace="gac"
  misc_feature (1)..(2205): /note="Variant residues given in the sequence have no preference with respect to those in the annotations for variant positions"

SEQ ID NO: 1222 - protein, 736 aa, Artificial Sequence; identical to SEQ ID NO: 930
  source: /note="Description of Artificial Sequence: Synthetic polypeptide"

SEQ ID NO: 1223 - protein, 736 aa, Artificial Sequence; identical to SEQ ID NO: 931
  source: /note="Description of Artificial Sequence: Synthetic polypeptide"

SEQ ID NO: 1224 - protein, 736 aa, Artificial Sequence; identical to SEQ ID NO: 932
  source: /note="Description of Artificial Sequence: Synthetic polypeptide"

SEQ ID NO: 1225 - protein, 736 aa, Artificial Sequence; identical to SEQ ID NO: 933
  source: /note="Description of Artificial Sequence: Synthetic polypeptide"

SEQ ID NO: 1226 - protein, 736 aa, Artificial Sequence; identical to SEQ ID NO: 934
  source: /note="Description of Artificial Sequence: Synthetic polypeptide"

SEQ ID NO: 1227 - protein, 736 aa, Artificial Sequence; identical to SEQ ID NO: 935
  source: /note="Description of Artificial Sequence: Synthetic polypeptide"

SEQ ID NO: 1228 - protein, 736 aa, Artificial Sequence; identical to SEQ ID NO: 936
  source: /note="Description of Artificial Sequence: Synthetic polypeptide"

SEQ ID NO: 1229 - protein, 736 aa, Artificial Sequence; identical to SEQ ID NO: 937
  source: /note="Description of Artificial Sequence: Synthetic polypeptide"

SEQ ID NO: 1230 - DNA, 2211 bp, Artificial Sequence; identical to SEQ ID NO: 938
  source: /note="Description of Artificial Sequence: Synthetic polynucleotide"

SEQ ID NO: 1231 - protein, 738 aa, Artificial Sequence; identical to SEQ ID NO: 18
  source: /note="Description of Artificial Sequence: Synthetic polypeptide"

SEQ ID NO: 1232 - protein, 738 aa, Artificial Sequence; identical to SEQ ID NO: 18
  source: /note="Description of Artificial Sequence: Synthetic polypeptide"

SEQ ID NO: 1233 - protein, 738 aa, Artificial Sequence
  source: /note="Description of Artificial Sequence: Synthetic polypeptide"
  VARIANT (157)..(157): /replace="Thr"
  VARIANT (169)..(169): /replace="Arg"
  VARIANT (457)..(457): /replace="Gly"
  VARIANT (463)..(463): /replace="Ala"
  VARIANT (508)..(508): /replace="Ala"
  VARIANT (510)..(510): /replace="Phe"
  VARIANT (511)..(511): /replace="Lys"
  VARIANT (558)..(558): /replace="Asn"
  VARIANT (585)..(585): /replace="His"
  VARIANT (587)..(587): /replace="Ala
  SITE (1)..(738): /note="Variant residues given in the sequence have no preference with respect to those in the annotations for variant positions"
MAADGYLPDWLEDNLSEGIREWWDLKPGAPKPKANQQKQDDGRGLVLPGYKYLGPFNGLDKGEPVNAADAAALEHDKAYDQQLKAGDNPYLRYNHADAEFQERLQEDTSFGGNLGRAVFQAKKRVLEPLGLVEEGAKTAPGKKRPVEQSPQEPDSSSLGIGKTGQQPAKKRLNFGQTGDSESVPDPQPLGEPPAAPSGVGSNTMASGGGAPMADNNEGADGVGNSSGNWHCDSTWLGDRVITTSTRTWALPTYNNHLYKQISNGTSGGSTNDNTYFGYSTPWGYFDFNRFHCHFSPRDWQRLINNNWGFRPKRLNFKLFNIQVKEVTTNEGTKTIANNLTSTVQVFTDSEYQLPYVLGSAHQGCLPPFPADVFMIPQYGYLTLNNGSQAVGRSSFYCLEYFPSQMLRTGNNFQFSYTFEDVPFHSSYAHSQSLDRLMNPLIDQYLYYLSRTQTTGTAGTQTLQFSQAGPSSMANQARNWVPGPCYRQQRVSTTTNQNNNSNFAWTGATKYHLNGRDSLMNPGVAMASHKDDEDRFFPSSGVLIFGKQGAGNDNVDYSQVMITNEEEIKTTNPVATEEYGAVATNNQSLANTQAQTGLVHNQGVLPGMVWQNRDVYLQGPIWAKIPHTDGNFHPSPLMGGFGLKHPPPQILIKNTPVPADPPTTFNQAKLNSFITQYSTGQVSVEIEWELQKENSKRWNPEIQYTSNYYKSTNVDFAVNTEGVYSEPRPIGTRYLTRNL

SEQ ID NO: 1234 - DNA, 2211 bp, Artificial Sequence
  source: /note="Description of Artificial Sequence: Synthetic polynucleotide"
  variation (469)..(471): /replace="acg"
  variation (502)..(504): /replace="aga"
  variation (1366)..(1368): /replace="gga"
  variation (1384)..(1386): /replace="gca"
  variation (1519)..(1521): /replace="gcc"
  variation (1525)..(1527): /replace="ttt"
  variation (1528)..(1530): /replace="aaa"
  variation (1669)..(1671): /replace="aac"
  variation (1750)..(1752): /replace="cac"
  variation (1756)..(1758): /replace="gcc"
  misc_feature (1)..(2211): /note="Variant residues given in the sequence have no preference with respect to those in the annotations for variant positions"
atggctgccgatggttatcttccagattggctcgaggacaacctctctgagggcattcgcgagtggtgggacttgaaacctggagccccgaaacccaaagccaaccagcaaaagcaggacgacggccggggtctggtgcttcctggctacaagtacctcggacccttcaacggactcgacaagggggagcccgtcaacgcggcggacgcagcggccctcgagcacgacaaagcctacgaccagcagctcaaagcgggtgacaatccgtacctgcggtataatcacgccgacgccgagtttcaggagcgtctgcaagaagatacgtcttttgggggcaacctcgggcgagcagtcttccaggccaagaagcgggttctcgaacctctcggtctggttgaggaaggcgctaagacggctcctggaaagaagaggccggtagagcagtcgccacaagagccagactcctcctcgggcatcggcaagacaggccagcagcccgctaaaaagagactcaattttggtcagactggcgactcagagtcagtccccgacccacaacctctcggagaacctccagcagccccctcaggtgtgggatctaatacaatggcttcaggcggtggcgctccaatggcagacaataacgaaggcgccgacggagtgggtaattcctcgggaaattggcattgcgattccacatggctgggggacagagtcatcaccaccagcacccgaacctgggccctgcccacctacaacaaccacctctacaagcaaatctccaacggcacctcgggaggaagcaccaacgacaacacctattttggctacagcaccccctgggggtattttgacttcaacagattccactgtcacttttcaccacgtgactggcaacgactcatcaacaacaattggggattccggcccaaaagactcaacttcaagctgttcaacatccaggtcaaggaagtcacgacgaacgaaggcaccaagaccatcgccaataatctcaccagcaccgtgcaggtctttacggactcggagtaccagttaccgtacgtgctaggatccgctcaccagggatgtctgcctccgttcccggcggacgtcttcatgattcctcagtacggctatttaactttaaacaatggaagccaagccgtgggacgttcctccttctactgtctggagtatttcccatcgcagatgctgagaaccggcaacaactttcagttcagctacaccttcgaggacgtgcctttccacagcagctacgcgcacagccagagcctggacaggctgatgaatcccctcatcgaccagtacctgtactacctgtccagaacgcaaacgactggaactgcagggacgcagactctgcaattcagccaagcgggtcctagctcaatggccaaccaggctagaaattgggtgcccggaccttgctaccggcagcagcgcgtctccacgacaaccaaccagaacaacaacagcaactttgcctggacgggagctaccaagtatcacctgaacggccgagactctctaatgaatccgggcgtggcaatggcttcccacaaggatgacgaggaccgcttcttcccttcgagcggggtcctgatttttggcaagcaaggagccgggaacgataatgtggattacagccaagtgatgattacaaatgaggaagaaatcaagactaccaaccccgtggccacagaagaatatggagcagtggccaccaacaaccagtccgccaatacgcaggcgcagaccggactcgtgcacaaccagggggtgcttcccggcatggtgtggcagaatagagacgtgtacctgcagggtcccatctgggccaaaattcctcacacggacggcaactttcacccgtctcccctgatgggcggctttggactgaagcacccgcctcctcaaattctcatcaagaacacaccggttccagcggacccgccgactaccttcaaccaggccaagctgaactctttcatcacgcagtacagcaccggacaggtcagcgtggaaatcgagtgggagctgcagaaagaaaacagcaaacgctggaatccagagattcaatacacttccaactactacaaatctacaaatgtggactttgctgtcaacacggagggggtttatagcgagcctcgccccattggcacccgttacctcacccgcaacctgtaa

SEQ ID NO: 1235 - protein, 733 aa, Artificial Sequence; identical to SEQ ID NO: 434
  source: /note="Description of Artificial Sequence: Synthetic polypeptide"

SEQ ID NO: 1236 - DNA, 4472 bp, Artificial Sequence
  source: /note="Description of Artificial Sequence: Synthetic polynucleotide"
ctccatcactaggggtaaccgcgaagcgcctcccacgctgccgcgtcagcgctgacgtaaattacgtcataggggagtggtcctgtattagctgtcacgtgagtgcttttgcgacattttgcgacaccacgtggccattcatggtatatatggccgagtgagcgagcaggatctccattttgaccgcgaaatttgaacgagcagcagccatgccgggcttctacgagatcgtgcttaaggtgccgagcgacctggacgagcacctgccgggcatttctgactcgtttgtgaactgggtggcagagaaggaatgggagctgcccccggattctgacatggatcggaatctgattgagcaggcacccctgaccgtggccgagaagctacagcgcgacttcctggtccaatggcgccgcgtgagtaaggccccggaggccctcttctttgttcagttcgagaagggcgagtcctacttccacctccatattctggtagagaccacgggggtcaaatccatggtgctgggccgcttcctgagtcagattcgggacaagctggtgcagaccatctaccgcgggatcgagccgaccctgcccaactggttcgcggtgacaaagacgcgtaatggcgccggaggggggaacaaggtggtggacgagtgctacatccccaactacctgctgcccaagactcagcccgagctgcagtgggcgtggactaacatggaggagtatataagcgcgtgcttgaacctggccgagcgcaaacggctcgtggcgcagcacctgacccacgtcagccagacccaggagcagaacaaggagaatctgaacccgaattctgacgcgcctgtcatccggtcaaaaacctccgcgcgctacatggagctggtcgggtggctggtggaccggggcatcacctccgagaagcagtggatccaggaggaccaggcctcgtacatctccttcaacgccgcctccaactcgcggtctcagatcaaggccgcgctggacaatgccggcaagatcatggcgctgaccaaatccgcgcccgactacctggtaggccccgctctgcccgcggacattaaatccaaccgcatctaccgcatcctggagctgaatggctacgaccctgcctacgccggttccgtctttctcggctgggcccagaaaaagtttggcaaaaggaacaccatctggctgtttgggccggccaccacgggcaagaccaacatcgcggaagccatcgcccacgccgtgcccttctacggctgcgtcaactggaccaatgagaactttcccttcaacgattgcgtcgacaagatggtgatctggtgggaggagggcaagatgacggccaaggtcgtggagtccgccaaggccattctcggcggcagcaaggtgcgcgtggaccaaaagtgcaagtcgtccgcccagatcgatcccacccccgtgatcgtcacctccaacaccaacatgtgcgccgtgattgacgggaacagcaccaccttcgagcaccagcagccgttgcaggaccggatgttcaaatttgaacttacccgccgtctggagcacgactttggcaaggtgacaaagcaggaagtcaaagagttcttccgctgggcgcaggatcacgtgaccgaggtggcgcatgagttctacgtcagaaagggtggagctaacaaaagacccgcccccgatgacgcggatataagcgagcccaagcgggcctgcccctcagtcgcggatccatcgacgtcagacgcggaaggagctccggtggactttgccgacaggtaccaaaacaaatgttctcgtcacgcgggcatgcttcagatgctgtttccctgcaaaacatgcgagagaatgaatcagaatttcaacatttgcttcacgcacgggaccagagactgttcagaatgtttccctggcgtgtcagaatctcaaccggtcgtcagaaaaaagacgtatcggaaactctgtgcgattcatcatctgctggggcgggcacccgagattgcttgctcggcctgcgacctggtcaacgtggacctggatgactgtgtttctgagcaataaatgacttaaaccaggtatggctgccgatggttatcttccagattggctcgaggacaacctctctgagggcattcgcgagtggtgggacctgaaacctggagccccgaaacccaaagccaaccagcaaaagcaggacaacggccggggtctggtgcttcctggctacaagtacctcggacccttcaacggactcgacaagggggagcccgtcaacgcggcggacgcagcggccctcgagcacgacaaggcctacgaccagcagctccaagcgggtgacaatccgtacctgcggtataatcacgccgacgccgagtttcaggagcgtctgcaagaagatacgtcttttgggggcaacctcgggcgcgcagtcttccaggccaaaaagcgggttctcgaacctctgggcctggttgaatcgccggttaagacggctcctggaaagaagagaccggtagagccatcaccccagcgctctccagactcctctacgggcatcggcaagaaaggccagcagcccgcaaaaaagagactcaattttgggcagactggcgactcagagtcagtccccgaccctcaaccaatcggagaaccaccagcaggcccctctggtctgggatctggtacaatggctgcaggcggtggcgctccaatggcagacaataacgaaggcgccgacggagtgggtagttcctcaggaaattggcattgcgattccacatggctgggcgacagagtcatcaccaccagcacccgcacctgggccctgcccacctacaacaaccacctctacaagcaaatctccaacgggacctcgggaggaagcaccaacgacaacacctacttcggctacagcaccccctgggggtattttgacttcaacagattccactgccacttttcaccacgtgactggcagcgactcatcaacaacaactggggattccggcccaagaggctcaacttcaagctcttcaacatccaagtcaaggaggtcacgcagaatgaaggcaccaagaccatcgccaataaccttaccagcacgattcaggtctttacggactcggaataccagctcccgtacgtgctcggctcggcgcaccagggctgcctgcctccgttcccggcggacgtcttcatgattcctcagtacgggtacctgactctgaacaatggcagtcaggctgtgggccggtcgtccttctactgcctggagtactttccttctcaaatgctgagaacgggcaacaactttgaattcagctacaacttcgaggacgtgcccttccacagcagctacgcgcacagccagagcctggaccggctgatgaaccctctcatcgaccagtacttgtactacctgtcccggactcaaagcacgggcggtactgcaggaactcagcagttgctattttctcaggccgggcctaacaacatgtcggctcaggccaagaactggctacccggtccctgctaccggcagcaacgcgtctccacgacactgtcgcagaacaacaacagcaactttgcctggacgggtgccaccaagtatcatctgaatggcagagactctctggtgaatcctggcgttgccatggctacccacaaggacgacgaagagcgattttttccatccagcggagtcttaatgtttgggaaacagggagctggaaaagacaacgtggactatagcagcgtgatgctaaccagcgaggaagaaataaagaccaccaacccagtggccacagaacagtacggcgtggtggccgataacctgcaacagcaaaacgccgctcctattgtaggggccgtcaatagtcaaggagccttacctggcatggtgtggcagaaccgggacgtgtacctgcagggtcccatctgggccaagattcctcatacggacggcaactttcatccctcgccgctgatgggaggctttggactgaagcatccgcctcctcagatcctgattaaaaacacacctgttcccgcggatcctccgaccaccttcactaaggccaagctggcttctttcatcacgcagtacagtaccggccaggtcagcgtggagatcgagtgggagctgcagaaggagaacagcaaacgctggaacccagagattcagtacacttccaactactacaaatctacaaatgtggactttgctgtcaatactgagggtacttattccgagcctcgccccattggcacccgttacctcacccgtaatctgtaattacatgttaatcaataaaccggttaattcgtttcagttgaactttggtctcctgtccttcttatcttatcggttaccatagaaactggttacttattaactgcttggtgcgcttcgcgataaaagacttacgtcatcgggttacccctagtgatgga

SEQ ID NO: 1237 - DNA, 2208 bp, Artificial Sequence
  source: /note="Description of Artificial Sequence: Synthetic polynucleotide"
atggctgccgatggttatcttccagattggctcgaggacactctctctgaaggaataagacagtggtggaagctcaaacctggcccaccaccaccaaagcccgcagagcggcataaggacgacagcaggggtcttgtgcttcctgggtacaagtacctcggacccttcaacggactcgacaagggagagccggtcaacgaggcagacgccgcggccctcgagcacgacaaagcctacgaccggcagctcgacagcggagacaacccgtacctcaagtacaaccacgccgacgcggagtttcaggagcgccttaaagaagatacgtcttttgggggcaacctcggacgagcagtcttccaggcgaaaaagagggttcttgaacctctgggcctggttgaggaacctgttaagaaggctccgggaaaaaagaggccggtagagcactctcctgtggagccagactcctcctcgggaaccggaaaggcgggccagcagcctgcaagaaaaagattgaattttggtcagactggagacgcagactcagtacctgacccccagcctctcggacagccaccagcagccccctctggtctgggaactaataccatggctacaggcagtggcgcaccaatggcagacaataacgagggtgccgacggagtgggtaattcctcgggaaattggcattgcgattccacatggatgggcgacagagtcatcaccaccagcacccgaacctgggccctgcccacctacaacaaccacctctacaaacaaatttccagccaatcaggagcctcgaacgacaatcactactttggctacagcaccccttgggggtattttgacttcaacagattccactgccacttttcaccacgtgactggcaaagactcatcaacaacaactggggattccgacccaagagactcaacttcaagctctttaacattcaagtcaaagaggtcacgcagaatgacggtacgacgacgattgccaataaccttaccagcacggttcaggtgtttactgactcggagtaccagctcccgtacgtcctcggctcggcgcatcaaggatgcctcccgccgttcccagcagacgtcttcatggtgccacagtatggatacctcaccctgaacaacgggagtcaggcagtaggacgctcttcattttactgcctggagtactttccttctcagatgctgcgtaccggaaacaactttaccttcagctacacttttgaggacgttcctttccacagcagctacgctcacagccagagtctggaccgtctcatgaatcctctcatcgaccagtacctgtattacttgagcagaacaaacactccaagtggaaccaccacgcagtcaaggcttcagttttctcaggccggagcgagtgacattcgggaccagtctaggaactggcttcctggaccctgttaccgccagcagcgagtatcaaagacatctgcggataacaacaacagtgaatactcgtggactggagctaccaagtaccacctcaatggcagagactctctggtgaatccgggcccggctatggcaagccacaaggacgatgaagaaaagttttttcctcagagcggggttctcatctttgggaagcaaggctcagagaaaacaaatgtggacattgaaaaggtcatgattacagacgaagaggaaatcaggacaaccaatcccgtggctacggagcagtatggttctgtatctaccaacctccagagaggcaacagacaagcagctaccgcagatgtcaacacacaaggcgttcttccaggcatggtctggcaggacagagatgtgtaccttcaggggcccatctgggcaaagattccacacacggacggacattttcacccctctcccctcatgggtggattcggacttaaacaccctcctccacagattctcatcaagaacaccccggtgcctgcgaatccttcgaccaccttcagtgcggcaaagtttgcttccttcatcacacagtactccacgggacaggtcagcgtggagatcgagtgggagctgcagaaggaaaacagcaaacgctggaatcccgaaattcagtacacttccaactacaacaagtctgttaatgtggactttactgtggacactaatggcgtgtattcagagcctcgccccattggcaccagatacctgactcgtaatctgtaa

SEQ ID NO: 1238 - protein, 735 aa, Artificial Sequence
  source: /note="Description of Artificial Sequence: Synthetic polypeptide"
MAADGYLPDWLEDTLSEGIRQWWKLKPGPPPPKPAERHKDDSRGLVLPGYKYLGPFNGLDKGEPVNEADAAALEHDKAYDRQLDSGDNPYLKYNHADAEFQERLKEDTSFGGNLGRAVFQAKKRVLEPLGLVEEPVKKAPGKKRPVEHSPVEPDSSSGTGKAGQQPARKRLNFGQTGDADSVPDPQPLGQPPAAPSGLGTNTMATGSGAPMADNNEGADGVGNSSGNWHCDSTWMGDRVITTSTRTWALPTYNNHLYKQISSQSGASNDNHYFGYSTPWGYFDFNRFHCHFSPRDWQRLINNNWGFRPKRLNFKLFNIQVKEVTQNDGTTTIANNLTSTVQVFTDSEYQLPYVLGSAHQGCLPPFPADVFMVPQYGYLTLNNGSQAVGRSSFYCLEYFPSQMLRTGNNFTFSYTFEDVPFHSSYAHSQSLDRLMNPLIDQYLYYLSRTNTPSGTTTQSRLQFSQAGASDIRDQSRNWLPGPCYRQQRVSKTSADNNNSEYSWTGATKYHLNGRDSLVNPGPAMASHKDDEEKFFPQSGVLIFGKQGSEKTNVDIEKVMITDEEEIRTTNPVATEQYGSVSTNLQRGNRQAATADVNTQGVLPGMVWQDRDVYLQGPIWAKIPHTDGHFHPSPLMGGFGLKHPPPQILIKNTPVPANPSTTFSAAKFASFITQYSTGQVSVEIEWELQKENSKRWNPEIQYTSNYNKSVNVDFTVDTNGVYSEPRPIGTRYLTRNL

SEQ ID NO: 1239 - DNA, 8376 bp, Artificial Sequence
  source: /note="Description of Artificial Sequence: Synthetic polynucleotide"
aattcccatcatcaataatataccttattttggattgaagccaatatgataatgagggggtggagtttgtgacgtggcgcggggcgtgggaacggggcgggtgacgtagtagtctctagagtcctgtattagaggtcacgtgagtgttttgcgacattttgcgacaccatgtggtcacgctgggtatttaagcccgagtgagcacgcagggtctccattttgaagcgggaggtttgaacgcgcagccaccacgccggggttttacgagattgtgattaaggtccccagcgaccttgacgggcatctgcccggcatttctgacagctttgtgaactgggtggccgagaaggaatgggagttgccgccagattctgacatggatctgaatctgattgagcaggcacccctgaccgtggccgagaagctgcagcgcgactttctgacggaatggcgccgtgtgagtaaggccccggaggcccttttctttgtgcaatttgagaagggagagagctacttccacatgcacgtgctcgtggaaaccaccggggtgaaatccatggttttgggacgtttcctgagtcagattcgcgaaaaactgattcagagaatttaccgcgggatcgagccgactttgccaaactggttcgcggtcacaaagaccagaaatggcgccggaggcgggaacaaggtggtggatgagtgctacatccccaattacttgctccccaaaacccagcctgagctccagtgggcgtggactaatatggaacagtatttaagcgcctgtttgaatctcacggagcgtaaacggttggtggcgcagcatctgacgcacgtgtcgcagacgcaggagcagaacaaagagaatcagaatcccaattctgatgcgccggtgatcagatcaaaaacttcagccaggtacatggagctggtcgggtggctcgtggacaaggggattacctcggagaagcagtggatccaggaggaccaggcctcatacatctccttcaatgcggcctccaactcgcggtcccaaatcaaggctgccttggacaatgcgggaaagattatgagcctgactaaaaccgcccccgactacctggtgggccagcagcccgtggaggacatttccagcaatcggatttataaaattttggaactaaacgggtacgatccccaatatgcggcttccgtctttctgggatgggccacgaaaaagttcggcaagaggaacaccatctggctgtttgggcctgcaactaccgggaagaccaacatcgcggaggccatagcccacactgtgcccttctacgggtgcgtaaactggaccaatgagaactttcccttcaacgactgtgtcgacaagatggtgatctggtgggaggaggggaagatgaccgccaaggtcgtggagtcggccaaagccattctcggaggaagcaaggtgcgcgtggaccagaaatgcaagtcctcggcccagatagacccgactcccgtgatcgtcacctccaacaccaacatgtgcgccgtgattgacgggaactcaacgaccttcgaacaccagcagccgttgcaagaccggatgttcaaatttgaactcacccgccgtctggatcatgactttgggaaggtcaccaagcaggaagtcaaagactttttccggtgggcaaaggatcacgtggttgaggtggagcatgaattctacgtcaaaaagggtggagccaagaaaagacccgcccccagtgacgcagatataagtgagcccaaacgggtgcgcgagtcagttgcgcagccatcgacgtcagacgcggaagcttcgatcaactacgcagacaggtaccaaaacaaatgttctcgtcacgtgggcatgaatctgatgctgtttccctgcagacaatgcgagagaatgaatcagaattcaaatatctgcttcactcacggacagaaagactgtttagagtgctttcccgtgtcagaatctcaacccgtttctgtcgtcaaaaaggcgtatcagaaactgtgctacattcatcatatcatgggaaaggtgccagacgcttgcactgcctgcgatctggtcaatgtggatttggatgactgcatctttgaacaataaatgatttaaatcaggtatggctgccgatggttatcttccagattggctcgaggacactctctctgaaggaataagacagtggtggaagctcaaacctggcccaccaccaccaaagcccgcagagcggcataaggacgacagcaggggtcttgtgcttcctgggtacaagtacctcggacccttcaacggactcgacaagggagagccggtcaacgaggcagacgccgcggccctcgagcacgacaaagcctacgaccggcagctcgacagcggagacaacccgtacctcaagtacaaccacgccgacgcggagtttcaggagcgccttaaagaagatacgtcttttgggggcaacctcggacgagcagtcttccaggcgaaaaagagggttcttgaacctctgggcctggttgaggaacctgttaagacggctccgggaaaaaagaggccggtagagcactctcctgtggagccagactcctcctcgggaaccggaaaggcgggccagcagcctgcaagaaaaagattgaattttggtcagactggagacgcagactcagtacctgacccccagcctctcggacagccaccagcagccccctctggtctgggaactaatacgatggctacaggcagtggcgcaccaatggcagacaataacgagggcgccgacggagtgggtaattcctcgggaaattggcattgcgattccacatggatgggcgacagagtcatcaccaccagcacccgaacctgggccctgcccacctacaacaaccacctctacaaacaaatttccagccaatcaggagcctcgaacgacaatcactactttggctacagcaccccttgggggtattttgacttcaacagattccactgccacttttcaccacgtgactggcaaagactcatcaacaacaactggggattccgacccaagagactcaacttcaagctctttaacattcaagtcaaagaggtcacgcagaatgacggtacgacgacgattgccaataaccttaccagcacggttcaggtgtttactgactcggagtaccagctcccgtacgtcctcggctcggcgcatcaaggatgcctcccgccgttcccagcagacgtcttcatggtgccacagtatggatacctcaccctgaacaacgggagtcaggcagtaggacgctcttcattttactgcctggagtactttccttctcagatgctgcgtaccggaaacaactttaccttcagctacacttttgaggacgttcctttccacagcagctacgctcacagccagagtctggaccgtctcatgaatcctctcatcgaccagtacctgtattacttgagcagaacaaacactccaagtggaaccaccacgcagtcaaggcttcagttttctcaggccggagcgagtgacattcgggaccagtctaggaactggcttcctggaccctgttaccgccagcagcgagtatcaaagacatctgcggataacaacaacagtgaatactcgtggactggagctaccaagtaccacctcaatggcagagactctctggtgaatccgggcccggccatggcaagccacaaggacgatgaagaaaagttttttcctcagagcggggttctcatctttgggaagcaaggctcagagaaaacaaatgtggacattgaaaaggtcatgattacagacgaagaggaaatcaggacaaccaatcccgtggctacggagcagtatggttctgtatctaccaacctccagagaggcaacagacaagcagctaccgcagatgtcaacacacaaggcgttcttccaggcatggtctggcaggacagagatgtgtaccttcaggggcccatctgggcaaagattccacacacggacggacattttcacccctctcccctcatgggtggattcggacttaaacaccctcctccacagattctcatcaagaacaccccggtacctgcgaatccttcgaccaccttcagtgcggcaaagtttgcttccttcatcacacagtactccacgggacaggtcagcgtggagatcgagtgggagctgcagaaggaaaacagcaaacgctggaatcccgaaattcagtacacttccaactacaacaagtctgttaatgtggactttactgtggacactaatggcgtgtattcagagcctcgccccattggcaccagatacctgactcgtaatctgtaattgcttgttaatcaataaaccgtttaattcgtttcagttgaactttggtctctgcgtatttctttcttatctagtttccatgctctagagtcctgtattagaggtcacgtgagtgttttgcgacattttgcgacaccatgtggtcacgctgggtatttaagcccgagtgagcacgcagggtctccattttgaagcgggaggtttgaacgcgcagccaccacggcggggttttacgagattgtgattaaggtccccagcgaccttgacgggcatctgcccggcatttctgacagctttgtgaactgggtggccgagaaggaatgggagttgccgccagattctgacatggatctgaatctgattgagcaggcacccctgaccgtggccgagaagctgcatcgctggcgtaatagcgaagaggcccgcaccgatcgcccttcccaacagttgcgcagcctgaatggcgaatggaattccagacgattgagcgtcaaaatgtaggtatttccatgagcgtttttcctgttgcaatggctggcggtaatattgttctggatattaccagcaaggccgatagtttgagttcttctactcaggcaagtgatgttattactaatcaaagaagtattgcgacaacggttaatttgcgtgatggacagactcttttactcggtggcctcactgattataaaaacacttctcaggattctggcgtaccgttcctgtctaaaatccctttaatcggcctcctgtttagctcccgctctgattctaacgaggaaagcacgttatacgtgctcgtcaaagcaaccatagtacgcgccctgtagcggcgcattaagcgcggcgggtgtggtggttacgcgcagcgtgaccgctacacttgccagcgccctagcgcccgctcctttcgctttcttcccttcctttctcgccacgttcgccggctttccccgtcaagctctaaatcgggggctccctttagggttccgatttagtgctttacggcacctcgaccccaaaaaacttgattagggtgatggttcacgtagtgggccatcgccctgatagacggtttttcgccctttgacgttggagtccacgttctttaatagtggactcttgttccaaactggaacaacactcaaccctatctcggtctattcttttgatttataagggattttgccgatttcggcctattggttaaaaaatgagctgatttaacaaaaatttaacgcgaattttaacaaaatattaacgtttacaatttaaatatttgcttatacaatcttcctgtttttggggcttttctgattatcaaccggggtacatatgattgacatgctagttttacgattaccgttcatcgattctcttgtttgctccagactctcaggcaatgacctgatagcctttgtagagacctctcaaaaatagctaccctctccggcatgaatttatcagctagaacggttgaatatcatattgatggtgatttgactgtctccggcctttctcacccgtttgaatctttacctacacattactcaggcattgcatttaaaatatatgagggttctaaaaatttttatccttgcgttgaaataaaggcttctcccgcaaaagtattacagggtcataatgtttttggtacaaccgatttagctttatgctctgaggctttattgcttaattttgctaattctttgccttgcctgtatgatttattggatgttggaattcctgatgcggtattttctccttacgcatctgtgcggtatttcacaccgcatatggtgcactctcagtacaatctgctctgatgccgcatagttaagccagccccgacacccgccaacacccgctgacgcgccctgacgggcttgtctgctcccggcatccgcttacagacaagctgtgaccgtctccgggagctgcatgtgtcagaggttttcaccgtcatcaccgaaacgcgcgagacgaaagggcctcgtgatacgcctatttttataggttaatgtcatgataataatggtttcttagacgtcaggtggcacttttcggggaaatgtgcgcggaacccctatttgtttatttttctaaatacattcaaatatgtatccgctcatgagacaataaccctgataaatgcttcaataatattgaaaaaggaagagtatgagtattcaacatttccgtgtcgcccttattcccttttttgcggcattttgccttcctgtttttgctcacccagaaacgctggtgaaagtaaaagatgctgaagatcagttgggtgcacgagtgggttacatcgaactggatctcaacagcggtaagatccttgagagttttcgccccgaagaacgttttccaatgatgagcacttttaaagttctgctatgtggcgcggtattatcccgtattgacgccgggcaagagcaactcggtcgccgcatacactattctcagaatgacttggttgagtactcaccagtcacagaaaagcatcttacggatggcatgacagtaagagaattatgcagtgctgccataaccatgagtgataacactgcggccaacttacttctgacaacgatcggaggaccgaaggagctaaccgcttttttgcacaacatgggggatcatgtaactcgccttgatcgttgggaaccggagctgaatgaagccataccaaacgacgagcgtgacaccacgatgcctgtagcaatggcaacaacgttgcgcaaactattaactggcgaactacttactctagcttcccggcaacaattaatagactggatggaggcggataaagttgcaggaccacttctgcgctcggcccttccggctggctggtttattgctgataaatctggagccggtgagcgtgggtctcgcggtatcattgcagcactggggccagatggtaagccctcccgtatcgtagttatctacacgacggggagtcaggcaactatggatgaacgaaatagacagatcgctgagataggtgcctcactgattaagcattggtaactgtcagaccaagtttactcatatatactttagattgatttaaaacttcatttttaatttaaaaggatctaggtgaagatcctttttgataatctcatgaccaaaatcccttaacgtgagttttcgttccactgagcgtcagaccccgtagaaaagatcaaaggatcttcttgagatcctttttttctgcgcgtaatctgctgcttgcaaacaaaaaaaccaccgctaccagcggtggtttgtttgccggatcaagagctaccaactctttttccgaaggtaactggcttcagcagagcgcagataccaaatactgtccttctagtgtagccgtagttaggccaccacttcaagaactctgtagcaccgcctacatacctcgctctgctaatcctgttaccagtggctgctgccagtggcgataagtcgtgtcttaccgggttggactcaagacgatagttaccggataaggcgcagcggtcgggctgaacggggggttcgtgcacacagcccagcttggagcgaacgacctacaccgaactgagatacctacagcgtgagctatgagaaagcgccacgcttcccgaagggagaaaggcggacaggtatccggtaagcggcagggtcggaacaggagagcgcacgagggagcttccagggggaaacgcctggtatctttatagtcctgtcgggtttcgccacctctgacttgagcgtcgatttttgtgatgctcgtcaggggggcggagcctatggaaaaacgccagcaacgcggcctttttacggttcctggccttttgctggccttttgctcacatgttctttcctgcgttatcccctgattctgtggataaccgtattaccgcctttgagtgagctgataccgctcgccgcagccgaacgaccgagcgcagcgagtcagtgagcgaggaagcggaagagcgcccaatacgcaaaccgcctctccccgcgcgttggccgattcattaatgca

SEQ ID NO: 1240 - DNA, 1085 bp, Artificial Sequence
  source: /note="Description of Artificial Sequence: Synthetic polynucleotide"
  modified_base (611)..(611): a, c, t, or g
  modified_base (640)..(640): a, c, t, or g
  modified_base (1039)..(1039): a, c, t, or g
tgcccacttacaacaaccatctctacaagcaaatctccagcvvmdcaggagctascaacgacaaccactactttggctacagcaccccttgggggtattttgactttaacagattccactgccacttctcaccacgtgactggcagcgactcattaacaacaactggggattccggcccaagaaactcagcttcaagctcttcaacatccaagttagaggggtcacgcagaacgatggcacgacgactattgccaataaccttaccagcacggttcaagtgtttacggactcggagtatcagctcccgtacgtgctcgggtcggcgcaccaaggctgtctcccgccgtttccagcggacgtcttcatggtccctcagtatggatacctcaccctgaacaacggaagtcaagcggtgggacgctcatccttttactgcctggagtacttcccttcgcagatgctaaggactggaaataacttccaattcagctataccttcgaggatgtaccttttcacagcagctacgctcacagccagagtttggatcgcttgatgaatcctcttattgatcagtatctgtactacctgaacagaacgcaargcamcvcnrgcggaacarccrvcmhsmrsvvsctgvngtttagccaggctgggcctcagtctatgtctttgcaggccagaaattggctacctgggccctgctaccggcaacagagactttcaamarycbmcrvcsrsaacaacaacagtrastttccttggmcagcggccagcamatatcatctcaatggccgcgactcgctggtgaatccaggaccagctatggccagtcacrrggacgatrmsgrsaratttttccctatgcacggcaatctaatatttggcaaasaarrcrscrvsrvarvcratrycgmsdwcgrsvrsgtaatgattacggatgaagaagagattcgtaccaccaatcctgtggcaacagagcagtatggaactgtggcaaataacttgcagrvsvvsmrsrvcvvscccacgdhtvvsrnsgtcvmscatcagggggccttacctggcatggtgtggcaagatcgt

SEQ ID NO: 1241 - protein, 620 aa, Artificial Sequence
  source: /note="Description of Artificial Sequence: Synthetic polypeptide"
  MOD_RES (263)..(264): Any naturally occurring amino acid
  MOD_RES (267)..(267): Any naturally occurring amino acid
  MOD_RES (450)..(453): Any naturally occurring amino acid
  MOD_RES (456)..(460): Any naturally occurring amino acid
  MOD_RES (462)..(462): Any naturally occurring amino acid
  MOD_RES (491)..(495): Any naturally occurring amino acid
  MOD_RES (500)..(500): Any naturally occurring amino acid
  MOD_RES (504)..(504): Any naturally occurring amino acid
  MOD_RES (508)..(508): Any naturally occurring amino acid
  MOD_RES (528)..(528): Any naturally occurring amino acid
  MOD_RES (531)..(533): Any naturally occurring amino acid
  MOD_RES (546)..(557): Any naturally occurring amino acid
  MOD_RES (586)..(590): Any naturally occurring amino acid
  MOD_RES (593)..(595): Any naturally occurring amino acid
  MOD_RES (597)..(597): Any naturally occurring amino acid
MAADGYLPDWLEDNLSEGIREWWALKPGVPQPKANQQHQDNRRGLVLPGYKYLGPGNGLDKGEPVNEADAAALEHDKAYDQQLKAGDNPYLKYNHADAEFQERLQEDTSFGGNLGRAVFQAKKRILEPLGLVEEAAKTAPGKKGAVDQSPQEPDSSSGVGKSGKQPARKRLNFGQTGDSESVPDPQPLGEPPAAPTSLGSNTMASGGGAPMADNNEGADGVGNSSGNWHCDSQWLGDRVITTSTRTWALPTYNNHLYKQISSXXGAXNDNHYFGYSTPWGYFDFNRFHCHFSPRDWQRLINNNWGFRPKKLSFKLFNIQVRGVTQNDGTTTIANNLTSTVQVFTDSEYQLPYVLGSAHQGCLPPFPADVFMVPQYGYLTLNNGSQAVGRSSFYCLEYFPSQMLRTGNNFQFSYTFEDVPFHSSYAHSQSLDRLMNPLIDQYLYYLNRTQXXXXGTXXXXXLXFSQAGPQSMSLQARNWLPGPCYRQQRLSXXXXXNNNSXFPWXAASXYHLNGRDSLVNPGPAMASHXDDXXXFFPMHGNLIFGKXXXXXXXXXXXXVMITDEEEIRTTNPVATEQYGTVANNLQXXXXXPTXXXVXHQGALPGMVWQDRDVYLQGPIWA

SEQ ID NO: 1242 - DNA, 1491 bp, Artificial Sequence
  source: /note="Description of Artificial Sequence: Synthetic polynucleotide"
accaccagcaccagaacctgggccctgcccacttacaacaaccatctctacaagcaaatctccagccaatcaggagcttcaaacgacaaccactactttggctacagcaccccttgggggtattttgactttaacagattccactgccacttctcaccacgtgactggcagcgactcattaacaacaactggggattccggcccaagaaactcagcttcaagctcttcaacatccaagttagaggggtcacgcagaacgatggcacgacgactattgccaataaccttaccagcacggttcaagtgtttacggactcggagtatcagctcccgtacgtgctcgggtcggcgcaccaaggctgtctcccgccgtttccagcggacgtcttcatggtccctcagtatggatacctcaccctgaacaacggaagtcaagcggtgggacgctcatccttttactgcctggagtacttcccttcgcagatgctaaggactggaaataacttccaattcagctataccttcgaggatgtaccttttcacagcagctacgctcacagccagagtttggatcgcttgatgaatcctcttattgatcagtatctgtactacctgaacagaacgcaaggaacaacctctggaacaaccaaccaatcacggctgctttttagccaggctgggcctcagtctatgtctttgcaggccagaaattggctacctgggccctgctaccggcaacagagactttcaaagactgctaacgacaacaacaacagtaactttccttggacagcggccagcaaatatcatctcaatggccgcgactcgctggtgaatccaggaccagctatggccagtcacaaggacgatgaagaaaaatttttccctatgcacggcaatctaatatttggcaaagaagggacaacggcaagtaacgcagaattagataatgtaatgattacggatgaagaagagattcgtaccaccaatcctgtggcaacagagcagtatggaactgtggcaaataacttgcagagctcaaatacagctcccacgactggaactgtcaatcatcagggggccttacctggcatggtgtggcaagatcgtgacgtctaccttcaaggacctatctgggcaaagattcctcacacggatggacactttcatccttctcctctgatgggaggctttggactgaaacatccgcctcctcaaatcatgatcaaaaatactccggtaccggcaaatcctccgacgactttcagcccggccaagtttgcttcatttatcactcagtactccactggacaggtcagcgtggaaattgagtgggagctacagaaagaaaacagcaaacgttggaatccagagattcagtacacttccaactacaacaagtctgttaatgtggactttactgtagacactaatggtgtttatagtgaacctcgccctattggaacccggtatctcacacgaaacttgtga

SEQ ID NO: 1243 - protein, 482 aa, Artificial Sequence
  source: /note="Description of Artificial Sequence: Synthetic polypeptide"
TTSTRTWALPTYNNHLYKQISSQSGASNDNHYFGYSTPWYFDFNRFHCHFSPRDWQRLNNNWGFRPKKLSFKLFNIQRGVTQNDGTTTIANNLTSTQVFTDSEYQLPYVLGSAHQCLPPFPADVFMVPQYGYLTNNGSQAVGRSSFYCLEYFPQMLRTGNNFQFSYTFEDVPHSSYAHSQSLDRLMNPLIDYLYYLNRTQGTTSGTTNQSLLFSQAGPQSMSLQARNWLGPCYRQQRLSKTANDNNNSFPWTAASKYHLNGRDSLVNGPAMASHKDDEEKFFPMHGLIFGKEGTTASNAELDNVMITDEEEIRTTNPVATEQYGTVANNLQSSNTAPTTGTVNHQGALPGMVWQDRDVYLQGPIWAKIPHTDGHFHPSPLMGGFGLKHPPPQIMIKNTPVPANPPTTFSPAKFASFITQYSTGQVSVEIEWELQKENSKRWNPEIQYTSNYNKSVNVDFTVDTNGVYSEPRPIGTRYLTRNL

SEQ ID NO: 1244 - DNA, 1140 bp, Artificial Sequence
  source: /note="Description of Artificial Sequence: Synthetic polynucleotide"
  modified_base (636)..(636): a, c, t, or g
  modified_base (665)..(665): a, c, t, or g
  modified_base (1064)..(1064): a, c, t, or g
accaccagcaccagaacctgggccctgcccacttacaacaaccatctctacaagcaaatctccagcvvmdcaggagctascaacgacaaccactactttggctacagcaccccttgggggtattttgactttaacagattccactgccacttctcaccacgtgactggcagcgactcattaacaacaactggggattccggcccaagaaactcagcttcaagctcttcaacatccaagttagaggggtcacgcagaacgatggcacgacgactattgccaataaccttaccagcacggttcaagtgtttacggactcggagtatcagctcccgtacgtgctcgggtcggcgcaccaaggctgtctcccgccgtttccagcggacgtcttcatggtccctcagtatggatacctcaccctgaacaacggaagtcaagcggtgggacgctcatccttttactgcctggagtacttcccttcgcagatgctaaggactggaaataacttccaattcagctataccttcgaggatgtaccttttcacagcagctacgctcacagccagagtttggatcgcttgatgaatcctcttattgatcagtatctgtactacctgaacagaacgcaargcamcvcnrgcggaacarccrvcmhsmrsvvsctgvngtttagccaggctgggcctcagtctatgtctttgcaggccagaaattggctacctgggccctgctaccggcaacagagactttcaamarycbmcrvcsrsaacaacaacagtrastttccttggmcagcggccagcamatatcatctcaatggccgcgactcgctggtgaatccaggaccagctatggccagtcacrrggacgatrmsgrsaratttttccctatgcacggcaatctaatatttggcaaasaarrcrscrvsrvarvcratrycgmsdwcgrsvrsgtaatgattacggatgaagaagagattcgtaccaccaatcctgtggcaacagagcagtatggaactgtggcaaataacttgcagrvsvvsmrsrvcvvscccacgdhtvvsrnsgtcvmscatcagggggccttacctggcatggtgtggcaagatcgtgacgtctaccttcaaggacctatctgggca

SEQ ID NO: 1245 - protein, 620 aa, Artificial Sequence; identical to SEQ ID NO: 1241
  source: /note="Description of Artificial Sequence: Synthetic polypeptide"
  MOD_RES (263)..(264): Any naturally occurring amino acid
  MOD_RES (267)..(267): Any naturally occurring amino acid
  MOD_RES (450)..(453): Any naturally occurring amino acid
  MOD_RES (456)..(460): Any naturally occurring amino acid
  MOD_RES (462)..(462): Any naturally occurring amino acid
  MOD_RES (491)..(495): Any naturally occurring amino acid
  MOD_RES (500)..(500): Any naturally occurring amino acid
  MOD_RES (504)..(504): Any naturally occurring amino acid
  MOD_RES (508)..(508): Any naturally occurring amino acid
  MOD_RES (528)..(528): Any naturally occurring amino acid
  MOD_RES (531)..(533): Any naturally occurring amino acid
  MOD_RES (546)..(557): Any naturally occurring amino acid
  MOD_RES (586)..(590): Any naturally occurring amino acid
  MOD_RES (593)..(595): Any naturally occurring amino acid
  MOD_RES (597)..(597): Any naturally occurring amino acid

SEQ ID NO: 1246 - protein, 738 aa, Artificial Sequence; identical to SEQ ID NO: 18
  source: /note="Description of Artificial Sequence: Synthetic polypeptide"

SEQ ID NO: 1247 - DNA, 2258 bp, Artificial Sequence
  source: /note="Description of Artificial Sequence: Synthetic polynucleotide"
tcgaggacaacctctctgagggcattcgcgagtggtgggacttgaaacctggagccccgaaacccaaagccaaccagcaaaagcaggacgacggccggggtctggtgcttcctggctacaagtacctcggacccttcaacggactcgacaagggggagcccgtcaacgcggcggacgcagcggccctcgagcacgacaaggcctacgaccagcagctcaaagcgggtgacaatccgtacctgcggtataaccacgccgacgccgagtttcaggagcgtctgcaagaagatacgtcttttgggggcaacctcgggcgagcagtcttccaggccaagaagcgggttctcgaacctctcggtctggttgaggaaggcgctaagacggctcctggaaagaagagaccggtagagccatcaccccagcgttctccagactcctctacgggcatcggcaagaaaggccagcagcccgcgaaaaagagactcaactttgggcagactggcgactcagagtcagtgcccgaccctcaaccaatcggagaaccccccgcaggcccctctggtctgggatctggtacaatggctgcaggcggtggcgctccaatggcagacaataacgaaggcgccgacggagtgggtagttcctcaggaaattggcattgcgattccacatggctgggcgacagagtcatcaccaccagcacccgaacctgggccctccccacctacaacaaccacctctacaagcaaatctccaacgggacttcgggaggaagcaccaacgacaacacctacttcggctacagcaccccctgggggtattttgactttaacagattccactgccacttctcaccacgtgactggcagcgactcatcaacaacaactggggattccggcccaagagactcaacttcaagctcttcaacatccaggtcaaggaggtcacgcagaatgaaggcaccaagaccatcgccaataaccttaccagcacgattcaggtctttacggactcggaataccagctcccgtacgtcctcggctctgcgcaccagggctgcctgcctccgttcccggcggacgtcttcatgattcctcagtacgggtacctgactctgaacaatggcagtcaggccgtgggccgttcctccttctactgcctggagtactttccttctcaaatgctgagaacgggcaacaactttgagttcagctaccagtttgaggacgtgccttttcacagcagctacgcgcacagccaaagcctggaccggctgatgaaccccctcatcgaccagtacctgtactacctgtctcggactcagtccacgggaggtaccgcaggaactcagcagttgctattttctcaggccgggcctaataacatgtcggctcaggccaaaaactggctacccgggccctgctaccggcagcaacgcgtctccacgacactgtcgcaaaataacaacagcaactttgcctggaccggtgccaccaagtatcatctgaatggcagagactctctggtaaatcccggtgtcgctatggcaacccacaaggacgacgaagagcgattttttccgtccagcggagtcttaatgtttgggaaacagggagctggaaaagacaacgtggactatagcagcgttatgctaaccagtgaggaagaaattaaaaccaccaacccagtggccacagaacagtacggcgtggtggccgataacctgcaacagcaaaacgccgctcctattgtaggggccgtcaacagtcaaggagccttacctggcatggtctggcagaaccgggacgtgtacctgcagggtcctatctgggccaagattcctcacacggacggaaactttcatccctcgccgctgatgggaggctttggactgaaacacccgcctcctcagatcctgattaagaatacacctgttcccgcggatcctccaactaccttcagtcaagctaagctggcgtcgttcatcacgcagtacagcaccggacaggtcagcgtggaaattgaatgggagctgcagaaagaaaacagcaaacgctggaacccagagattcaatacacttccaactactacaaatctacaaatgtggactttgctgttaacacagatggcacttattctgagcctcgccccatcggcacccgttacctcacccgtaatctgtaattgcttgttaatcaataaaccggttgattcgtttcagttgaactttggtctctgcgaagggcgaattcgttt

SEQ ID NO: 1248 - DNA, 2208 bp, Artificial Sequence
  source: /note="Description of Artificial Sequence: Synthetic polynucleotide"
atggctgccgatggttatcttccagattggctcgaggacactctctctgaaggaataagacagtggtggaagctcaaacctggcccaccaccaccaaagcccgcagagcggcataaggacgacagcaggggtcttgtgcttcctgggtacaagtacctcggacccttcaacggactcgacaagggagagccggtcaacgaggcagacgccgcggccctcgagcacgacaaagcctacgaccggcagctcgacagcggagacaacccgtacctcaagtacaaccacgccgacgcggagtttcaggagcgccttaaagaagatacgtcttttgggggcaacctcggacgagcagtcttccaggcgaaaaagagggttcttgaacctctgggcctggttgaggaacctgttaagacggctccgggaaaaaagaggccggtagagcactctcctgtggagccagactcctcctcgggaaccggaaaggcgggccagcagcctgcaagaaaaagattgaattttggtcagactggagacgcagactcagtacctgacccccagcctctcggacagccaccagcagccccctctggtctgggaactaatacgatggctacaggcagtggcgcaccaatggcagacaataacgagggcgccgacggagtgggtaattcctcgggaaattggcattgcgattccacatggatgggcgacagagtcatcaccaccagcacccgaacctgggccctgcccacctacaacaaccacctctacaaacaaatttccagccaatcaggagcctcgaacgacaatcactactttggctacagcaccccttgggggtattttgacttcaacagattccactgccacttttcaccacgtgactggcaaagactcatcaacaacaactggggattccgacccaagagactcaacttcaagctctttaacattcaagtcaaagaggtcacgcagaatgacggtacgacgacgattgccaataaccttaccagcacggttcaggtgtttactgactcggagtaccagctcccgtacgtcctcggctcggcgcatcaaggatgcctcccgccgttcccagcagacgtcttcatggtgccacagtatggatacctcaccctgaacaacgggagtcaggcagtaggacgctcttcattttactgcctggagtactttccttctcagatgctgcgtaccggaaacaactttaccttcagctacacttttgaggacgttcctttccacagcagctacgctcacagccagagtctggaccgtctcatgaatcctctcatcgaccagtacctgtatttcttaagcagaacaaacactccaagtggaaccaccacgcagtcaaggcttcagttttctcaggccggagcgagtgacattcgggaccagtctaggaactggcttcctggaccctgttaccgccagcagcgagtatcaaagacatctgcggataacaacaacagtgaattctcgtggaccggtgctaccaagtaccacctcaatggcagagactctctggtgaatccgggcccggccatggcaagccacaaggacgatgaagaaaagttttttcctcagagcggggttctcatctttgggaagcaaggctcagagaaaacaaatgtggacattgaaaaggtcatgattacagacgaagaggaaatcaggacaaccaatcccgtggctacggagcagtatggttctgtatctaccaacctccagagaggcaacagacaagcagctaccgcagatgtcaacacacaaggcgttcttccaggcatggtctggcaggacagagatgtgtaccttcaggggcccatctgggcaaagattccacacacggacggacattttcacccctctcccctcatgggtggattcggacttaaacaccctcctccacagattctcatcaagaacaccccggtacctgcgaatccttcgaccaccttcagtgcggcaaagtttgcttccttcatcacacagtactccacgggacaggtcagcgtggagatcgagtgggagctgcagaaggaaaacagcaaacgctggaatcccgaaattcagtacacttccaactacaacaagtctgttaatgtggactttactgtggacactaatggcgtgtattcagagcctcgccccattggtaccagattcctgactcgtaatctgtaa

SEQ ID NO: 1249 - protein, 737 aa, Artificial Sequence
  source: /note="Description of Artificial Sequence: Synthetic polypeptide"
MAADGYLPDWLEDNLSEGIREWWDLKPGAPKPKANQQKQDNGRGLVLPGYKYLGPFNGLDKGEPVNAADAAALEHDKAYDQQLQAGDNPYLRYNHADAEFQERLQEDTSFGGNLGRAVFQAKKRVLEPLGLVESPVKTAPGKKRPVEPSPQRSPDSSTGIGKKGQQPAKKRLNFGQTGDSESVPDPQPIGEPPAAPSGVGPNTMAAGGGAPMADNNEGADGVGSSSGNWHCDSTWLGDRVITTSTRTWALPTYNNHLYKQISNGTSGGSTNDNTYFGYSTPWGYFDFNRFHCHFSPRDWQRLINNNWGFRPKRLNFKLFNIQVKEVTQNEGTKTIANNLTSTIQVFTDSEYQLPYVLGSAHQGCLPPFPADVFMIPQYGYLTLNNGSQAVGRSSFYCLEYFPSQMLRTGNNFEFSYNFEDVPFHSSYAHSQSLDRLMNPLIDQYLYYLSRTQSTGGTAGTQQLLFSQAGPNNMSAQAKNWLPGPCYRQQRVSTTLSQNNNSNFAWTGATKYHLNGRDSLVNPGVAMATHKDDEERFFPSSGVLMFGKQGAGKDNVDYSSVMLTSEEEIKTTNPVATEQYGWADNLQQQNAAPIVGAVNSQGALPGMVWQNRDVYLQGPIWAKIPHTDGNFHPSPLMGGFGLKHPPPQILIKNTPVPADPPTTFNQAKLASFITQYSTGQVSVEIEWELQKENSKRWNPEIQYTSNYYKSTNVDFAVNTEGTYSEPRPIGTRYLTRNL

SEQ ID NO: 1250 - DNA, 2211 bp, Artificial Sequence
  source: /note="Description of Artificial Sequence: Synthetic polynucleotide"
atggctgccgatggttatcttccagattggctcgaggacactctctctgaaggaataagacagtggtggaagctcaaacctggcccaccaccaccaaagcccgcagagcggcataaggacgacagcaggggtcttgtgcttcctgggtacaagtacctcggacccttcaacggactcgacaagggagagccggtcaacgaggcagacgccgcggccctcgagcacgacaaagcctacgaccggcagctcgacagcggagacaacccgtacctcaagtacaaccacgccgacgcggagtttcaggagcgccttaaagaagatacgtcttttgggggcaacctcggacgagcagtcttccaggcgaaaaagagggttcttgaacctctgggcctggttgaggaacctgttaagacggctccgggaaaaaagaggccggtagagcactctcctgtggagccagactcctcctcgggaaccggaaaggcgggccagcagcctgcaagaaaaagattgaattttggtcagactggagacgcagactcagtacctgacccccagcctctcggacagccaccagcagccccctctggtctgggaactaatacgatggctacaggcagtggcgcaccaatggcagacaataacgagggcgccgacggagtgggtaattcctcgggaaattggcattgcgattccacatggatgggcgacagagtcatcaccaccagcacccgaacctgggccctgcccacctacaacaaccacctctacaaacaaatttccagcgcttcaacgggagcctcgaacgacaatcactactttggctacagcaccccttgggggtattttgacttcaacagattccactgccacttttcaccacgtgactggcaaagactcatcaacaacaactggggattccgacccaagagactcaacttcaagctctttaacattcaagtcaaagaggtcacgcagaatgacggtacgacgacgattgccaataaccttaccagcacggttcaggtgtttactgactcggagtaccagctcccgtacgtcctcggctcggcgcatcaaggatgcctcccgccgttcccagcagacgtcttcatggtgccacagtatggatacctcaccctgaacaacgggagtcaggcagtaggacgctcttcattttactgcctggagtactttccttctcagatgctgcgtaccggaaacaactttaccttcagctacacttttgaggacgttcctttccacagcagctacgctcacagccagagtctggaccgtctcatgaatcctctcatcgaccagtacctgtattacttgagcagaacaaacactccaagtggaaccaccacgcagtcaaggcttcagttttctcaggccggagcgagtgacattcgggaccagtctaggaactggcttcctggaccctgttaccgccagcagcgagtatcaaagacatctgcggataacaacaacagtgaatactcgtggactggagctaccaagtaccacctcaatggcagagactctctggtgaatccgggcccggccatggcaagccacaaggacgatgaagaaaagttttttcctcagagcggggttctcatctttgggaagcaaggctcagagaaaacaaatgtggacattgaaaaggtcatgattacagacgaagaggaaatcaggacaaccaatcccgtggctacggagcagtatggttctgtatctaccaacctccagagaggcaacagacaagcagctaccgcagatgtcaacacacaaggcgttcttccaggcatggtctggcaggacagagatgtgtaccttcaggggcccatctgggcaaagattccacacacggacggacattttcacccctctcccctcatgggtggattcggacttaaacaccctcctccacagattctcatcaagaacaccccggtacctgcgaatccttcgaccaccttcagtgcggcaaagtttgcttccttcatcacacagtactccacgggacaggtcagcgtggagatcgagtgggagctgcagaaggaaaacagcaaacgctggaatcccgaaattcagtacacttccaactacgccaagtctgtcaatgtggactttactgtggacaataatggcgtgtattcagagcctcgccccattggcaccagatacctgactcgtaatctgtaa

SEQ ID NO: 1251 - DNA, 2208 bp, Artificial Sequence
  source: /note="Description of Artificial Sequence: Synthetic polynucleotide"
atggctgccgatggttatcttccagattggctcgaggacaacctctctgagggcattcgcgagtggtgggacttgaaacctggagccccgaagcccaaagccaaccagcaaaagcaggacgacggccggggtctggtgcttcctggctacaagtacctcggacccttcaacggactcgacaagggggagcccgtcaacgcggcggacgcagcggccctcgagcacgacaaggcctacgaccagcagctcaaagcgggtgacaatccgtacctgcggtataaccacgccgacgccgagtttcaggagcgtctgcaagaagatacgtcttttgggggcaacctcgggcgagcagtcttccaggccaagaagcgggttctcgaacctctcggtctggttgaggaaggcgctaagacggctcctggaaagaaacgtccggtagagcagtcgccacaagagccagactcctcctcgggcatcggcaagacaggccagcagcccgctaaaaagagactcaattttggtcagactggcgactcagagtcagtccccgatccacaacctctcggagaacctccagcaacccccgctgctgtgggacctactacaatggcttcaggcggtggcgcaccaatggcagacaataacgaaggcgccgacggagtgggtaatgcctcaggaaattggcattgcgattccacatggctgggcgacagagtcatcaccaccagcacccgcacctgggccttgcccacctacaataaccacctctacaagcaaatctccagtgcttcaggggccagcaacgacaaccactacttcggctacagcaccccctgggggtattttgatttcaacagattccactgccacttttcaccacgtgactggcagcgactcatcaacaacaattggggattccggcccaagagactcaacttcaaactcttcaacatccaagtcaaggaggtcacgacgaatgatggcgtcacaaccatcgctaataaccttaccagcacggttcaagtcttctcggactcggagtaccagcttccgtacgtcctcggctctgcgcaccagggctgcctccctccgttcccggcggacgtgttcatgattccgcaatacggctacctgacgctcaacaatggcagccaagccgtgggacgttcatccttttactgcctggaatatttcccttctcagatgctgagaacgggcaacaactttaccttcagctacacctttgaggaagtgcctttccacagcagctacgcgcacagccagagcctggaccggctgatgaatcctctcatcgaccaatacctgtattacctgaacagaactcaaaatcagtccggaagtgcccaaaacaaggacttgctgtttagccgtgggtctccagctggcatgtctgttcagcccaaaaactggctacctggaccctgttatcggcagcagcgcgtttctaaaacaaaaacagacaacaacaacagcaattttacctggactggtgcttcaaaatataacctcaatgggcgtgaatccatcatcaaccctggcactgctatggcctcacacaaagacgacgaagacaagttctttcccatgagcggtgtcatgatttttggaaaagagagcgccggagcttcaaacactgcattggacaatgtcatgattacagacgaagaggaaattaaagccactaaccctgtggccaccgaaagatttgggaccgtggcagtcaatttccagagcagcagcacagaccctgcgaccggagatgtgcatgctatgggagcattacctggcatggtgtggcaagatagagacgtgtacctgcagggtcccatttgggccaaaattcctcacacagatggacactttcacccgtctcctcttatgggcggctttggactcaagaacccgcctcctcagatcctcatcaaaaacacgcctgttcctgcgaatcctccggcggagttttcagctacaaagtttgcttcattcatcacccaatactccacaggacaagtgagtgtggaaattgaatgggagctgcagaaagaaaacagcaagcgctggaatcccgaagtgcagtacacatccaattatgcaaaatctgccaacgttgattttactgtggacaacaatggactttatactgagcctcgccccattggcacccgttaccttacccgtcccctgtaa

SEQ ID NO: 1252 - DNA, 2205 bp, Artificial Sequence
  source: /note="Description of Artificial Sequence: Synthetic polynucleotide"
atggctgccgatggttatcttccagattggctcgaggacaacctctdgagggcattcgcgagtggtgggacttgaaacctggagccccgaaacccaaagccaaccagcaaaagcaggacgacggccggggtdggtgcttcctggctacaagtacctcggacccttcaacggactcgacaagggggagcccgtcaacgcggcggatgcagcggccctcgagcacgacaaggcctacgaccagcagctcaaagcgggtgacaatccgtacctgcggtataaccacgccgacgccgagtttcaggagcgtctgcaagaagatacgtcttttgggggcaacctcgggcgagcagtcttccaggccaagaagagggttctcgaaccttttggtdggttgaggaaggtgctaagacggctcctggaaagaaacgtccggtagagcagtcgccacaagagccagactcctcctcgggcattggcaagacaggccagcagcccgctaaaaagagactcaattttggtcagactggcgactcagagtcagtccccgacccacaacctctcggagaacctccagcaacccccgctgctgtgggacctactacaatggcttcaggcggtggcgcaccaatggcagacaataacgaaggcgccgacggagtgggtaatgcctcaggaaattggcattgcgattccacatggctgggcgacagagtcatcaccaccagcacccgaacatgggccttgcccacctataacaaccacctctacaagcaaatctccagtgcttcaggggccagcaacgacaaccactacttcggctacagcaccccctgggggtattttgatttcaacagattccactgccatttctcaccacgtgactggcagcgactcatcaacaacaattggggattccggcccaagagactcaacttcaagctcttcaacatccaagtcaaggaggtcacgacgaatgatggcgtcacgaccatcgctaataaccttaccagcacggttcaagtcttctcggactcggagtaccagttgccgtacgtcctcggctctgcgcaccagggctgcctccctccgttcccggcggacgtgttcatgattccgcagtacggctacctaacgctcaacaatggcagccaggcagtgggacggtcatccttttactgcctggaatatttcccatcgcagatgctgagaacgggcaataactttaccttcagctacaccttcgaggacgtgcctttccacagcagctacgcgcacagccagagcctggaccggctgatgaatcctctcatcgaccagtacctgtattacctgaacagaactcagaatcagtccggaagtgcccaaaacaaggacttgctgtttagccgggggtctccagctggcatgtctgttcagcccaaaaactggctacctggaccctgttaccggcagcagcgcgtttctaaaacaaaaacagacaacaacaacagcaactttacctggactggtgcttcaaaatataaccttaatgggcgtgaatctataatcaaccctggcactgctatggcctcacacaaagacgacaaagacaagttctttcccatgagcggtgtcatgatttttggaaaggagagcgccggagcttcaaacactgcattggacaatgtcatgatcacagacgaagaggaaatcaaagccactaaccccgtggccaccgaaagatttgggactgtggcagtcaatctccagagcagcagcacagaccctgcgaccggagatgtgcatgttatgggagccttacctggaatggtgtggcaagacagagacgtatacctgcagggtcctatttgggccaaaattcctcacacggatggacactttcacccgtctcctctcatgggcggctttggacttaagcacccgcctcctcagatcctcatcaaaaacacgcctgttcctgcgaatcctccggcagagttttcggctacaaagtttgcttcattcatcacccagtattccacaggacaagtgagcgtggagattgaatgggagctgcagaaagaaaacagcaaacgctggaatcccgaagtgcagtatacatctaactatgcaaaatctgccaacgttgatttcactgtggacaacaatggactttatactgagcctcgccccattggcacccgttacctcacccgtcccctgtaa

SEQ ID NO: 1253 - DNA, 2208 bp, Artificial Sequence
  source: /note="Description of Artificial Sequence: Synthetic polynucleotide"
atggctgccgatggttatcttccagattggctcgaggacaacctctctgagggcattcgcgagtggtgggacttgaaacctggagccccgaaacccaaagccaaccagcaaaagcaggacgacggccggggtctggtgcttcctggctacaagtacctcggacccttcaacggactcgacaagggggagcccgtcaacgcggcggatgcagcggccctcgagcacgacaaggcctacgaccagcagctcaaagcgggtgacaatccgtacctgcggtataaccacgccgacgccgagtttcaggagcgtctgcaagaagatacgtcttttgggggcaacctcgggcgagcagtcttccaggccaagaagagggttctcgaaccttttggtctggttgaggaaggtgctaagacggctcctggaaagaaacgtccggtagagcagtcgccacaagagccagactcctcctcgggcattggcaagacaggccagcagcccgctaaaaagagactcaattttggtcagactggcgactcagagtcagtccccgacccacaacctctcggagaacctccagcaacccccgctgctgtgggacctactacaatggcttcaggcggtggcgcaccaatggcagacaataacgaaggcgccgacggagtgggtaatgcctcaggaaattggcattgcgattccacatggctgggcgacagagtcatcaccaccagcacccgaacatgggccttgcccacctataacaaccacctctacaagcaaatctccagtgcttcaggggccagcaacgacaaccactacttcggctacagcaccccctgggggtattttgatttcaacagattccactgccatttctcaccacgtgactggcagcgactcatcaacaacaattggggattccggcccaagagactcaacttcaagctcttcaacatccaagtcaaggaggtcacgacgaatgatggcgtcacgaccatcgctaataaccttaccagcacggttcaagtcttctcggactcggagtaccagttgccgtacgtcctcggctctgcgcaccagggctgcctccctccgttcccggcggacgtgttcatgattccgcagtacggctacctaacgctcaacaatggcagccaggcagtgggacggtcatccttttactgcctggaatatttcccatcgcagatgctgagaacgggcaataactttaccttcagctacaccttcgaggacgtgcctttccacagcagctacgcgcacagccagagcctggaccggctgatgaatcctctcatcgaccagtacctgtattacctgaacagaactcagaatcagtccggaagtgcccaaaacaaggacttgctgtttagccgggggtctccagctggcatgtctgttcagcccaaaaactggctacctggaccctgttaccggcagcagcgcgtttctaaaacaaaaacagacaacaacaacagcaactttacctggactggtgcttcaaaatataaccttaatgggcgtgaatctataatcaaccctggcactgctatggcctcacacaaagacgacgaagacaagttctttcccatgagcggtgtcatgatttttggaaaggagagcgccggagcttcaaacactgcattggacaatgtcatgatcacagacgaagaggaaatcaaagccactaaccccgtggccaccgaaagatttgggactgtggcagtcaatctccagagcagcagcacagaccctgcgaccggagatgtgcatgttatgggagccttacctggaatggtgtggcaagacagagacgtatacctgcagggtcctatttgggccaaaattcctcacacggatggacactttcacccgtctcctctcatgggcggctttggacttaagcacccgcctcctcagatcctcatcaaaaacacgcctgttcctgcgaatcctccggcagagttttcggctacaaagtttgcttcattcatcacccagtattccacaggacaagtgagcgtggagattgaatgggagctgcagaaagaaaacagcaaacgctggaatcccgaagtgcagtatacatctaactatgcaaaatctgccaacgttgatttcactgtggacaacaatggactttatactgagcctcgccccattggcacccgttacctcacccgtcccctgtaa

SEQ ID NO: 1254 - DNA, 2208 bp, Artificial Sequence
  source: /note="Description of Artificial Sequence: Synthetic polynucleotide"
atggctgccgatggttatcttccagattggctcgaggacactctctctgaaggaataagacagtggtggaagctcaaacctggcccaccaccaccaaagcccgcagagcggcataaggacgacagcaggggtcttgtgcttcctgggtacaagtacctcggacccttcaacggactcgacaagggagagccggtcaacgaggcagacgccgcggccctcgagcacgacaaagcctacgaccggcagctcgacagcggagacaacccgtacctcaagtacaaccacgccgacgcggagtttcaggagcgccttaaagaagatacgtcttttgggggcaacctcggacgagcagtcttccaggcgaaaaagagggttcttgaacctctgggcctggttgaggaacctgttaagacggctccgggaaaaaagaggccggtagagcactctcctgtggagccagactcctcctcgggaaccggaaaggcgggccagcagcctgcaagaaaaagattgaattttggtcagactggagacgcagactcagtacctgacccccagcctctcggacagccaccagcagccccctctggtctgggaactaatacgatggctacaggcagtggcgcaccaatggcagacaataacgagggcgccgacggagtgggtaattcctcgggaaattggcattgcgattccacatggatgggcgacagagtcatcaccaccagcacccgaacctgggccctgcccacctacaacaaccacctctacaaacaaatttccagccaatcaggagcctcgaacgacaatcactactttggctacagcaccccttgggggtattttgacttcaacagattccactgccacttttcaccacgtgactggcaaagactcatcaacaacaactggggattccgacccaagagactcaacttcaagctctttaacattcaagtcaaagaggtcacgcagaatgacggtacgacgacgattgccaataaccttaccagcacggttcaggtgtttactgactcggagtaccagctcccgtacgtcctcggctcggcgcatcaaggatgcctcccgccgttcccagcagacgtcttcatggtgccacagtatggatacctcaccctgaacaacgggagtcaggcagtaggacgctcttcattttactgcctggagtactttccttctcagatgctgcgtaccggaaacaactttaccttcagctacacttttgaggacgttcctttccacagcagctacgctcacagccagagtctggaccgtctcatgaatcctctcatcgaccagtacctgtattacttgagcagaacaaacactccaagtggaaccaccacgcagtcaaggcttcagttttctgtggccggacccagtaacatggctgtccagggaaggaactggcttcctggaccctgttaccgccagcagcgagtatcaaagacatctgcggataacaacaacagtgaatttgcttggactggagctaccaagtaccacctcaatggcagagactctctggtgaatccgggcccggccatggcaagccacaaggacgatgaagaaaagttttttcctcagagcggggttctcatctttgggaagcaaggctcagagaaaacaaatgtggacattgaaaaggtcatgattacagacgaagaggaaatcaggacaaccaatcccgtggctacggagcagtatggttctgtatctaccaacctccagcaacagaacacagcaccagctaccgcagatgtcaacacacaaggcgttcttccaggcatggtctggcaggacagagatgtgtaccttcaggggcccatctgggcaaagattccacacacggacggacattttcacccctctcccctcatgggtggattcggacttaaacaccctcctccacagattctcatcaagaacaccccggtacctgcgaatccttcgaccaccttcagtgcggcaaagtttgcttccttcatcacacagtactccacgggacaggtcagcgtggagatcgagtgggagctgcagaaggaaaacagcaaacgctggaatcccgaaattcagtacacttccaactacaacaagtctgttaatgtggactttactgtggacactaatggcgtgtattcagagcctcgccccattggcaccagatacctgactcgtaatctgtaa

SEQ ID NO: 1255 - protein, 735 aa, Artificial Sequence
  source: /note="Description of Artificial Sequence: Synthetic polypeptide"
MAADGYLPDWLEDTLSEGIRQWWKLKPGPPPPKPAERHKDDSRGLVLPGYKYLGPFNGLDKGEPVNEADAAALEHDKAYDRQLDSGDNPYLKYNHADAEFQERLKEDTSFGGNLGRAVFQAKKRVLEPLGLVEEPVKTAPGKKRPVEHSPVEPDSSSGTGKAGQQPARKRLNFGQTGDADSVPDPQPLGQPPAAPSGLGTNTMATGSGAPMADNNEGADGVGNSSGNWHCDSTWMGDRVITTSTRTWALPTYNNHLYKQISSQSGASNDNHYFGYSTPWGYFDFNRFHCHFSPRDWQRLINNNWGFRPKRLNFKLFNIQVKEVTQNDGTTTIANNLTSTVQVFTDSEYQLPYVLGSAHQGCLPPFPADVFMVPQYGYLTLNNGSQAVGRSSFYCLEYFPSQMLRTGNNFTFSYTFEDVPFHSSYAHSQSLDRLMNPLIDQYLYYLSRTNTPSGTTTQSRLQFSVAGPSNMAVQGRNWLPGPCYRQQRVSKTSADNNNSEFAWTGATKYHLNGRDSLVNPGPAMASHKDDEEKFFPQSGVLIFGKQGSEKTNVDIEKVMITDEEEIRTTNPVATEQYGSVSTNLQQQNTAPATADVNTQGVLPGMVWQDRDVYLQGPIWAKIPHTDGHFHPSPLMGGFGLKHPPPQILIKNTPVPANPSTTFSAAKFASFITQYSTGQVSVEIEWELQKENSKRWNPEIQYTSNYNKSVNVDFTVDTNGVYSEPRPIGTRYLTRNL

SEQ ID NO: 1256 - DNA, 2208 bp, Artificial Sequence
  source: /note="Description of Artificial Sequence: Synthetic polynucleotide"
atggctgccgatggttatcttccagattggctcgaggacactctctctgaaggaataagacagtggtggaagctcaaacctggcccaccaccaccaaagcccgcagagcggcataaggacgacagcaggggtcttgtgcttcctgggtacaagtacctcggacccttcaacggactcgacaagggagagccggtcaacgaggcagacgccgcggccctcgagcacgacaaagcctacgaccggcagctcgacagcggagacaacccgtacctcaagtacaaccacgccgacgcggagtttcaggagcgccttaaagaagatacgtcttttgggggcaacctcggacgagcagtcttccaggcgaaaaagaggattcttgaacctctgggcctggttgaggaacctgttaagacggctccgggaaaaaagaggccggtagagcactctcctgcggagccagactcctcctcgggaaccggaaagtcgggccagcagcctgcaagaaaaagattgaattttggtcagactggagacgcagactcagtacctgacccccagcctctcggacagccaccagcagccccctctggtctgggaactaatacgatggcttcaggcagtggcgcaccaatggcagacaataacgagggcgccgacggagtgggtaattcctcgggaaattggcattgcgattccacatggatgggcgacagagtcatcaccaccagcacccgaacctgggccctgcccacctacaacaaccacctctacaaacaaatttccagccaatcaggagcctcgaacgacaatcactactttggctacagcaccccttgggggtattttgacttcaacagattccactgccacttttcaccacgtgactggcaaagactcatcaacaacaactggggattccgacccaagagactcagcttcaagctctttaacattcaagtcaaagaggtcacgcagaatgacggtacgacgacgattgccaataaccttaccagcacggttcaggtgtttactgactcggagtaccagctcccgtacgtcctcggctcggcgcatcaaggatgcctcccgccgttcccagcagacgtcttcatggtgccacagtatggatacctcaccctgaacaacgggagtcaggcagtaggacgctcttcattttactgcctggagtactttccttctcagatgctgcgtaccggaaacaactttaccttcagctacacttttgaggacgttcctttccacagcagctacgctcacagccagagtctggaccgtctcatgaatcctctcatcgaccagtacctgtattacttgagcagaacaaacactccaagtggaaccaccacgatgtcaaggcttcagttttctcaggccggagcgagtgacattcgggaccagtctaggaactggcttcctggaccctgttaccgccagcagcgagtatcaaagacagctgcggataacaacaacagtgattactcgtggactggagctaccaagtaccacctcaatggcagagactctctggtgaatccgggcccggccatggcaagccacaaggacgatgaagaaaagtattttcctcagagcggggttctcatctttgggaagcaagactcaggaaaaacaaatgtggacattgaaaaggtcatgattacagacgaagaggaaatcaggacaaccaatcccgtggctacggagcagtatggttctgtatctaccaacctccagagcggcaacacacaagcagctacctcagatgtcaacacacaaggcgttcttccaggcatggtctggcaggacagagatgtgtaccttcaggggcccatctgggcaaagattccacacacggacggacattttcacccctctcccctcatgggtggattcggacttaaacaccctcctccacagattctcatcaagaacaccccggtacctgcgaatccttcgaccaccttcagtgcggcaaagtttgcttccttcatcacacagtactccacgggacaggtcagcgtggagatcgagtgggagctgcagaaggaaaacagcaaacgctggaatcccgaaattcagtacacttccaactacaacaagtctgttaatgtggactttactgtggacactaatggcgtgtattcagagcctcgccccattggcaccagatacctgactcgtaatctgtaa

SEQ ID NO: 1257 - DNA, 2208 bp, Artificial Sequence
  source: /note="Description of Artificial Sequence: Synthetic polynucleotide"
atggctgccgatggttatcttccagattggctcgaggacactctctctgaaggaataagacagtggtggaagctcaaacctggcccaccaccaccaaagcccgcagagcggcataaggacgacagcaggggtcttgtgcttcctgggtacaagtacctcggacccttcaacggactcgacaagggagagccggtcaacgaggcagacgccgcggccctcgagcacgacaaagcctacgaccggcagctcgacagcggagacaacccgtacctcaagtacaaccacgccgacgcggagtttcaggagcgccttaaagaagatacgtcttttgggggcaacctcggacgagcagtcttccaggcgaaaaagaggattcttgaacctctgggcctggttgaggaacctgttaagacggctccgggaaaaaagaggccggtagagcactctcctgcggagccagactcctcctcgggaaccggaaagtcgggccagcagcctgcaagaaaaagattgaattttggtcagactggagacgcagactcagtacctgacccccagcctctcggacagccaccagcagccccctctggtctgggaactaatacgatggcttcaggcagtggcgcaccaatggcagacaataacgagggcgccgacggagtgggtaattcctcgggaaattggcattgcgattccacatggatgggcgacagagtcatcaccaccagcacccgaacctgggccctgcccacctacaacaaccacctctacaaacaaatttccagccaatcaggagcctcgaacgacaatcactactttggctacagcaccccttgggggtattttgacttcaacagattccactgccacttttcaccacgtgactggcaaagactcatcaacaacaactggggattccgacccaagagactcaacttcaagctctttaacattcaagtcaaagaggtcacgcagaatgacggtacgacgacgattgccaataaccttaccagcacggttcaggtgtttactgactcggagtaccagctcccgtacgtcctcggctcggcgcatcaaggatgcctcccgccgttcccagcagacgtcttcatggtgccacagtatggatacctcaccctgaacaacgggagtcaggcagtaggacgctcttcattttactgcctggagtactttccttctcagatgctgcgtaccggaaacaactttaccttcagctacacttttgaggacgttcctttccacagcagctacgctcacagccagagtctggaccgtctcatgaatcctctcatcgaccagtacctgtattacttgagcagaacaaacactccaagtggaaccaccacgatgtcaaggcttcagttttctcaggccggagcgagtgacattcgggaccagtctaggaactggcttcctggaccctgttaccgccagcagcgagtatcaaagacagctgcggataacaacaacagtgattactcgtggactggagctaccaagtaccacctcaatggcagagactctctggtgaatccgggcccggccatggcaagccacaaggacgatgaagaaaagtattttcctcagagcggggttctcatctttgggaagcaagactcaggaaaaacaaatgtggacattgaaaaggtcatgattacagacgaagaggaaatcaggacaaccaatcccgtggctacggagcagtatggttctgtatctaccaacctccagagcggcaacacacaagcagctacctcagatgtcaacacacaaggcgttcttccaggcatggtctggcaggacagagatgtgtaccttcaggggcccatctgggcaaagattccacacacggacggacattttcacccctctcccctcatgggtggattcggacttaaacaccctcctccacagattctcatcaagaacaccccggtacctgcgaatccttcgaccaccttcagtgcggcaaagtttgcttccttcatcacacagtactccacgggacaggtcagcgtggagatcgagtgggagctgcagaaggaaaacagcaaacgctggaatcccgaaattcagtacacttccaactacaacaagtctgttaatgtggactttactgtggacactaatggcgtgtattcagagcctcgccccattggcaccagatacctgactcgtaatctgtaa

SEQ ID NO: 1258 - protein, 735 aa, Artificial Sequence
  source: /note="Description of Artificial Sequence: Synthetic polypeptide"
MAADGYLPDWLEDTLSEGIRQWWKLKPGPPPPKPAERHKDDSRGLVLPGYKYLGPFNGLDKGEPVNEADAAALEHDKAYDRQLDSGDNPYLKYNHADAEFQERLKEDTSFGGNLGRAVFQAKKRILEPLGLVEEPVKTAPGKKRPVEHSPAEPDSSSGTGKSGQQPARKRLNFGQTGDADSVPDPQPLGQPPAAPSGLGTNTMASGSGAPMADNNEGADGVGNSSGNWHCDSTWMGDRVITTSTRTWALPTYNNHLYKQISSQSGASNDNHYFGYSTPWGYFDFNRFHCHFSPRDWQRLINNNWGFRPKRLNFKLFNIQVKEVTQNDGTTTIANNLTSTVQVFTDSEYQLPYVLGSAHQGCLPPFPADVFMVPQYGYLTLNNGSQAVGRSSFYCLEYFPSQMLRTGNNFTFSYTFEDVPFHSSYAHSQSLDRLMNPLIDQYLYYLSRTNTPSGTTTMSRLQFSQAGASDIRDQSRNWLPGPCYRQQRVSKTAADNNNSDYSWTGATKYHLNGRDSLVNPGPAMASHKDDEEKYFPQSGVLIFGKQDSGKTNVDIEKVMITDEEEIRTTNPVATEQYGSVSTNLQSGNTQAATSDVNTQGVLPGMVWQDRDVYLQGPIWAKIPHTDGHFHPSPLMGGFGLKHPPPQILIKNTPVPANPSTTFSAAKFASFITQYSTGQVSVEIEWELQKENSKRWNPEIQYTSNYNKSVNVDFTVDTNGVYSEPRPIGTRYLTRNL

SEQ ID NO: 1259 - protein, 736 aa, Artificial Sequence
  source: /note="Description of Artificial Sequence: Synthetic polypeptide"
MAADGYLPDWLEDNLSEGIREWWDLKPGAPKPKANQQKQDDGRGLVLPGYKYLGPFNGLDKGEPVNAADAAALEHDKAYDQQLKAGDNPYLRYNHADAEFQERLQEDTSFGGNLGRAVFQAKKRVLEPFGLVEEGAKTAPGKKRPVEQSPQEPDSSSGIGKTGQQPAKKRLNFGQTGDSESVPDPQPLGEPPATPAAVGPTTMASGGGAPMADNNEGADGVGNASGNWHCDSTWLGDRVITTSTRTWALPTYNNHLYKQISSASTGASNDNHYFGYSTPWGYFDFNRFHCHFSPRDWQRLINNNWGFRPKRLNFKLFNIQVKEVTTNDGVTTIANNLTSTVQVFSDSEYQLPYVLGSAHQGCLPPFPADVFMIPQYGYLTLNNGSQAVGRSSFYCLEYFPSQMLRTGNNFTFSYTFEDVPFHSSYAHSQSLDRLMNPLIDQYLYFLNRTQNQSGSAQNKDLLFSRGSPAGMSVQPKNWLPGPCYRQQRVSKTKTDNNNSNFTWTGASKYNLNGRESIINPGTAMASHKDDKDKFFPMSGVMIFGKESAGASNTALDNVMITDEEEIKATNPVATERFGTVAVNLQSSSTDPATGDVHVMGALPGMVWQDRDVYLQGPIWAKIPHTDGHFHPSPLMGGFGLKHPPPQILIKNTPVPANPPAEFSATKFASFITQYSTGQVSVEIEWELQKENSKRWNPEVQYTSNYAKSANVDFTVDNNGLYTEPRPIGTRYLTRPL

SEQ ID NO: 1260 - protein, 747 aa, Artificial Sequence
  source: /note="Description of Artificial Sequence: Synthetic polypeptide"
MAADGYLPDWLEDTLSEGIRQWWKLKPGPPPPKPAERHKDDSRGLVLPGYKYLGPFNGLDKGEPVNEADAAALEHDKAYDRQLDSGDNPYLKYNHADAEFQERLKEDTSFGGNLGRAVFQAKKRVLEPLGLVEEPVKTAPGKKRPVEHSPVEPDSSSGTGKAGQQPARKRLNFGQTGDADSVPDPQPLGQPPAAPSGLGTNTMATGSGAPMADNNEGADGVGNSSGNWHCDSTWMGDRVITTSTRTWALPTYNNHLYKQISSQSGASNDNHYFGYSTPWGYFDFNRFHCHFSPRDWQRLINNNWGFRPKRLNFKLFNIQVKEVTQNDGTTTIANNLTSTVQVFTDSEYQLPYVLGSAHQGCLPPFPADVFMVPQYGYLTLNNGSQAVGRSSFYCLEYFPSQMLRTGNNFTFSYTFEDVPFHSSYAHSQSLDRLMNPLIDQYLYYLSRTNTPSGTTTQSRLQFSQAGASDIRDQSRNWLPGPCYRQQRVSKTSADNNNSEYSWTGATKYHLNGRDSLVNPGPAMASHKDDEEKFFPQSGVLIFGKQGSEKTNVDIEKVMITDEEEIRTTNPVATEQYGSVSTNLQRGNAAAGSTPPPMAARQAATADVNTQGVLPGMVWQDRDVYLQGPIWAKIPHTDGHFHPSPLMGGFGLKHPPPQILIKNTPVPANPSTTFSAAKFASFITQYSTGQVSVEIEWELQKENSKRWNPEIQYTSNYNKSVNVDFTVDTNGVYSEPRPIGTRYLTRNL

SEQ ID NO: 1261 - protein, 747 aa, Artificial Sequence
  source: /note="Description of Artificial Sequence: Synthetic polypeptide"
MAADGYLPDWLEDTLSEGIRQWWKLKPGPPPPKPAERHKDDSRGLVLPGYKYLGPFNGLDKGEPVNEADAAALEHDKAYDRQLDSGDNPYLKYNHADAEFQERLKEDTSFGGNLGRAVFQAKKRVLEPLGLVEEPVKTAPGKKRPVEHSPVEPDSSSGTGKAGQQPARKRLNFGQTGDADSVPDPQPLGQPPAAPSGLGTNTMATGSGAPMADNNEGADGVGNSSGNWHCDSTWMGDRVITTSTRTWALPTYNNHLYKQISSQSGASNDNHYFGYSTPWGYFDFNRFHCHFSPRDWQRLINNNWGFRPKRLNFKLFNIQVKEVTQNDGTTTIANNLTSTVQVFTDSEYQLPYVLGSAHQGCLPPFPADVFMVPQYGYLTLNNGSQAVGRSSFYCLEYFPSQMLRTGNNFTFSYTFEDVPFHSSYAHSQSLDRLMNPLIDQYLYYLSRTNTPSGTTTQSRLQFSQAGASDIRDQSRNWLPGPCYRQQRVSKTSADNNNSEYSWTGATKYHLNGRDSLVNPGPAMASHKDDEEKFFPQSGVLIFGKQGSEKTNVDIEKVMITDEEEIRTTNPVATEQYGSVSTNLQRGNAAAGETRAPLAARQAATADVNTQGVLPGMVWQDRDVYLQGPIWAKIPHTDGHFHPSPLMGGFGLKHPPPQILIKNTPVPANPSTTFSAAKFASFITQYSTGQVSVEIEWELQKENSKRWNPEIQYTSNYNKSVNVDFTVDTNGVYSEPRPIGTRYLTRNL

SEQ ID NO: 1262 - protein, 7 aa, Artificial Sequence
  source: /note="Description of Artificial Sequence: Synthetic peptide"
TLAVPFK

SEQ ID NO: 1263 - protein, 7 aa, Artificial Sequence
  source: /note="Description of Artificial Sequence: Synthetic peptide"
KFPVALT

SEQ ID NO: 1264 - protein, 6 aa, Artificial Sequence
  source: /note="Description of Artificial Sequence: Synthetic peptide"
LAVPFK

SEQ ID NO: 1265 - protein, 5 aa, Artificial Sequence
  source: /note="Description of Artificial Sequence: Synthetic peptide"
AVPFK

SEQ ID NO: 1266 - protein, 4 aa, Artificial Sequence
  source: /note="Description of Artificial Sequence: Synthetic peptide"
VPFK

SEQ ID NO: 1267 - protein, 6 aa, Artificial Sequence
  source: /note="Description of Artificial Sequence: Synthetic peptide"
TLAVPF

SEQ ID NO: 1268 - protein, 5 aa, Artificial Sequence
  source: /note="Description of Artificial Sequence: Synthetic peptide"
TLAVP

SEQ ID NO: 1269 - protein, 4 aa, Artificial Sequence
  source: /note="Description of Artificial Sequence: Synthetic peptide"
TLAV

SEQ ID NO: 1270 - protein, 7 aa, Artificial Sequence
  source: /note="Description of Artificial Sequence: Synthetic peptide"
SVSKPFL

SEQ ID NO: 1271 - protein, 7 aa, Artificial Sequence
  source: /note="Description of Artificial Sequence: Synthetic peptide"
FTLTTPK

SEQ ID NO: 1272 - protein, 7 aa, Artificial Sequence
  source: /note="Description of Artificial Sequence: Synthetic peptide"
MNATKNV

SEQ ID NO: 1273 - protein, 7 aa, Artificial Sequence
  source: /note="Description of Artificial Sequence: Synthetic peptide"
QSSQTPR

SEQ ID NO: 1274 - protein, 7 aa, Artificial Sequence
  source: /note="Description of Artificial Sequence: Synthetic peptide"
ILGTGTS

SEQ ID NO: 1275 - protein, 7 aa, Artificial Sequence
  source: /note="Description of Artificial Sequence: Synthetic peptide"
TRTNPEA

SEQ ID NO: 1276 - protein, 7 aa, Artificial Sequence
  source: /note="Description of Artificial Sequence: Synthetic peptide"
NGGTSSS

SEQ ID NO: 1277 - protein, 7 aa, Artificial Sequence
  source: /note="Description of Artificial Sequence: Synthetic peptide"
YTLSQGW

SEQ ID NO: 1278 - DNA, 21 bp, Artificial Sequence
  source: /note="Description of Artificial Sequence: Synthetic oligonucleotide"
aagtttcctgtggcgttgact

SEQ ID NO: 1279 - DNA, 21 bp, Artificial Sequence
  source: /note="Description of Artificial Sequence: Synthetic oligonucleotide"
actttggcggtgccttttaag

SEQ ID NO: 1280 - DNA, 21 bp, Artificial Sequence
  source: /note="Description of Artificial Sequence: Synthetic oligonucleotide"
agtgtgagtaagccttttttg

SEQ ID NO: 1281 - DNA, 21 bp, Artificial Sequence
  source: /note="Description of Artificial Sequence: Synthetic oligonucleotide"
tttacgttgacgacgcctaag

SEQ ID NO: 1282 - DNA, 21 bp, Artificial Sequence
  source: /note="Description of Artificial Sequence: Synthetic oligonucleotide"
atgaatgctacgaagaatgtg

SEQ ID NO: 1283 - DNA, 21 bp, Artificial Sequence
  source: /note="Description of Artificial Sequence: Synthetic oligonucleotide"
cagtcgtcgcagacgcctagg

SEQ ID NO: 1284 - DNA, 21 bp, Artificial Sequence
  source: /note="Description of Artificial Sequence: Synthetic oligonucleotide"
attctggggactggtacttcg

SEQ ID NO: 1285 - DNA, 21 bp, Artificial Sequence
  source: /note="Description of Artificial Sequence: Synthetic oligonucleotide"
acgcggactaatcctgaggct

SEQ ID NO: 1286 - DNA, 21 bp, Artificial Sequence
  source: /note="Description of Artificial Sequence: Synthetic oligonucleotide"
aatggggggactagtagttct

SEQ ID NO: 1287 - DNA, 21 bp, Artificial Sequence
  source: /note="Description of Artificial Sequence: Synthetic oligonucleotide"
tatactttgtcgcagggttgg

SEQ ID NO: 1288 - protein, 11 aa, Artificial Sequence
  source: /note="Description of Artificial Sequence: Synthetic peptide"
AQTLAVPFKAQ

SEQ ID NO: 1289 - protein, 11 aa, Artificial Sequence
  source: /note="Description of Artificial Sequence: Synthetic peptide"
AQSVSKPFLAQ

SEQ ID NO: 1290 - protein, 11 aa, Artificial Sequence
  source: /note="Description of Artificial Sequence: Synthetic peptide"
AQFTLTTPKAQ

SEQ ID NO: 1291 - protein, 11 aa, Artificial Sequence
  source: /note="Description of Artificial Sequence: Synthetic peptide"
DGTLAVPFKAQ

SEQ ID NO: 1292 - protein, 11 aa, Artificial Sequence
  source: /note="Description of Artificial Sequence: Synthetic peptide"
ESTLAVPFKAQ

SEQ ID NO: 1293 - protein, 11 aa, Artificial Sequence
  source: /note="Description of Artificial Sequence: Synthetic peptide"
GGTLAVPFKAQ

SEQ ID NO: 1294 - protein, 11 aa, Artificial Sequence
  source: /note="Description of Artificial Sequence: Synthetic peptide"
AQTLATPFKAQ

SEQ ID NO: 1295 - protein, 11 aa, Artificial Sequence
  source: /note="Description of Artificial Sequence: Synthetic peptide"
ATTLATPFKAQ

SEQ ID NO: 1296 - protein, 11 aa, Artificial Sequence
  source: /note="Description of Artificial Sequence: Synthetic peptide"
DGTLATPFKAQ

SEQ ID NO: 1297 - protein, 11 aa, Artificial Sequence
  source: /note="Description of Artificial Sequence: Synthetic peptide"
GGTLATPFKAQ

SEQ ID NO: 1298 - protein, 11 aa, Artificial Sequence
  source: /note="Description of Artificial Sequence: Synthetic peptide"
SGSLAVPFKAQ

SEQ ID NO: 1299 - protein, 11 aa, Artificial Sequence
  source: /note="Description of Artificial Sequence: Synthetic peptide"
AQTLAQPFKAQ

SEQ ID NO: 1300 - protein, 11 aa, Artificial Sequence
  source: /note="Description of Artificial Sequence: Synthetic peptide"
AQTLQQPFKAQ

SEQ ID NO: 1301 - protein, 11 aa, Artificial Sequence
  source: /note="Description of Artificial Sequence: Synthetic peptide"
AQTLSNPFKAQ

SEQ ID NO: 1302 - protein, 11 aa, Artificial Sequence
  source: /note="Description of Artificial Sequence: Synthetic peptide"
AQTLAVPFSNP

SEQ ID NO: 1303 - protein, 11 aa, Artificial Sequence
  source: /note="Description of Artificial Sequence: Synthetic peptide"
QGTLAVPFKAQ

SEQ ID NO: 1304 - protein, 11 aa, Artificial Sequence
  source: /note="Description of Artificial Sequence: Synthetic peptide"
NQTLAVPFKAQ

SEQ ID NO: 1305 - protein, 11 aa, Artificial Sequence
  source: /note="Description of Artificial Sequence: Synthetic peptide"
EGSLAVPFKAQ

SEQ ID NO: 1306 - protein, 11 aa, Artificial Sequence
  source: /note="Description of Artificial Sequence: Synthetic peptide"
SGNLAVPFKAQ

SEQ ID NO: 1307 - protein, 11 aa, Artificial Sequence
  source: /note="Description of Artificial Sequence: Synthetic peptide"
EGTLAVPFKAQ

SEQ ID NO: 1308 - protein, 11 aa, Artificial Sequence
  source: /note="Description of Artificial Sequence: Synthetic peptide"
DSTLAVPFKAQ

SEQ ID NO: 1309 - protein, 11 aa, Artificial Sequence
  source: /note="Description of Artificial Sequence: Synthetic peptide"
AVTLAVPFKAQ

SEQ ID NO: 1310 - protein, 11 aa, Artificial Sequence
  source: /note="Description of Artificial Sequence: Synthetic peptide"
AQTLSTPFKAQ

SEQ ID NO: 1311 - protein, 11 aa, Artificial Sequence
  source: /note="Description of Artificial Sequence: Synthetic peptide"
AQTLPQPFKAQ

SEQ ID NO: 1312 - protein, 11 aa, Artificial Sequence
  source: /note="Description of Artificial Sequence: Synthetic peptide"
AQTLSQPFKAQ

SEQ ID NO: 1313 - protein, 11 aa, Artificial Sequence
  source: /note="Description of Artificial Sequence: Synthetic peptide"
AQTLQLPFKAQ

SEQ ID NO: 1314 - protein, 11 aa, Artificial Sequence
  source: /note="Description of Artificial Sequence: Synthetic peptide"
AQTLTMPFKAQ

SEQ ID NO: 1315 - protein, 11 aa, Artificial Sequence
  source: /note="Description of Artificial Sequence: Synthetic peptide"
AQTLTTPFKAQ

SEQ ID NO: 1316 - protein, 11 aa, Artificial Sequence
  source: /note="Description of Artificial Sequence: Synthetic peptide"
AQYTLSQGWAQ

SEQ ID NO: 1317 - protein, 11 aa, Artificial Sequence
  source: /note="Description of Artificial Sequence: Synthetic peptide"
AQMNATKNVAQ

SEQ ID NO: 1318 - protein, 11 aa, Artificial Sequence
  source: /note="Description of Artificial Sequence: Synthetic peptide"
AQVSGGHHSAQ

SEQ ID NO: 1319 - protein, 11 aa, Artificial Sequence
  source: /note="Description of Artificial Sequence: Synthetic peptide"
AQTLTAPFKAQ

SEQ ID NO: 1320 - protein, 11 aa, Artificial Sequence
  source: /note="Description of Artificial Sequence: Synthetic peptide"
AQTLSKPFKAQ

SEQ ID NO: 1321 - protein, 7 aa, Artificial Sequence
  source: /note="Description of Artificial Sequence: Synthetic peptide"
QAVRTSL

SEQ ID NO: 1322 - protein, 7 aa, Artificial Sequence
  source: /note="Description of Artificial Sequence: Synthetic peptide"
LAKERLS

SEQ ID NO: 1323 - protein, 7 aa, Artificial Sequence
  source: /note="Description of Artificial Sequence: Synthetic peptide"
MNSTKNV

SEQ ID NO: 1324 - protein, 7 aa, Artificial Sequence
  source: /note="Description of Artificial Sequence: Synthetic peptide"
VSGGHHS

SEQ ID NO: 1325 - protein, 14 aa, Artificial Sequence
  source: /note="Description of Artificial Sequence: Synthetic peptide"
SAQTLAVPFKAQAQ

SEQ ID NO: 1326 - protein, 14 aa, Artificial Sequence
  source: /note="Description of Artificial Sequence: Synthetic peptide"
  MOD_RES (2)..(4): Any amino acid
SXXXLAVPFKAQAQ

SEQ ID NO: 1327 - protein, 14 aa, Artificial Sequence
  source: /note="Description of Artificial Sequence: Synthetic peptide"
  MOD_RES (4)..(6): Any amino acid
SAQXXXVPFKAQAQ

SEQ ID NO: 1328 - protein, 14 aa, Artificial Sequence
  source: /note="Description of Artificial Sequence: Synthetic peptide"
  MOD_RES (6)..(8): Any amino acid
SAQTLXXXFKAQAQ

SEQ ID NO: 1329 - protein, 14 aa, Artificial Sequence
  source: /note="Description of Artificial Sequence: Synthetic peptide"
  MOD_RES (8)..(10): Any amino acid
SAQTLAVXXXAQAQ

SEQ ID NO: 1330 - protein, 14 aa, Artificial Sequence
  source: /note="Description of Artificial Sequence: Synthetic peptide"
  MOD_RES (10)..(12): Any amino acid
SAQTLAVPFXXXAQ

SEQ ID NO: 1331 - protein, 7 aa, Artificial Sequence
  source: /note="Description of Artificial Sequence: Synthetic peptide"
TNHQSAQ

SEQ ID NO: 1332 - protein, 7 aa, Artificial Sequence
  source: /note="Description of Artificial Sequence: Synthetic peptide"
AQAQTGW

SEQ ID NO: 1333 - protein, 9 aa, Artificial Sequence
  source: /note="Description of Artificial Sequence: Synthetic peptide"
DGTLATPFK

SEQ ID NO: 1334 - protein, 11 aa, Artificial Sequence
  source: /note="Description of Artificial Sequence: Synthetic peptide"
  MOD_RES (10)..(11): Any amino acid
DGTLATPFKXX

SEQ ID NO: 1335 - protein, 8 aa, Artificial Sequence
  source: /note="Description of Artificial Sequence: Synthetic peptide"
LAVPFKAQ

SEQ ID NO: 1336 - protein, 6 aa, Artificial Sequence
  source: /note="Description of Artificial Sequence: Synthetic peptide"
VPFKAQ

SEQ ID NO: 1337 - protein, 4 aa, Artificial Sequence
  source: /note="Description of Artificial Sequence: Synthetic peptide"
FKAQ

SEQ ID NO: 1338 - protein, 6 aa, Artificial Sequence
  source: /note="Description of Artificial Sequence: Synthetic peptide"
AQTLAV

SEQ ID NO: 1339 - protein, 8 aa, Artificial Sequence
  source: /note="Description of Artificial Sequence: Synthetic peptide"
AQTLAVPF

SEQ ID NO: 1340 - protein, 4 aa, Artificial Sequence
  source: /note="Description of Artificial Sequence: Synthetic peptide"
QAVR

SEQ ID NO: 1341 - protein, 4 aa, Artificial Sequence
  source: /note="Description of Artificial Sequence: Synthetic peptide"
AVRT

SEQ ID NO: 1342 - protein, 4 aa, Artificial Sequence
  source: /note="Description of Artificial Sequence: Synthetic peptide"
VRTS

SEQ ID NO: 1343 - protein, 4 aa, Artificial Sequence
  source: /note="Description of Artificial Sequence: Synthetic peptide"
RTSL

SEQ ID NO: 1344 - protein, 5 aa, Artificial Sequence
  source: /note="Description of Artificial Sequence: Synthetic peptide"
QAVRT

SEQ ID NO: 1345 - protein, 5 aa, Artificial Sequence
  source: /note="Description of Artificial Sequence: Synthetic peptide"
AVRTS

SEQ ID NO: 1346 - protein, 5 aa, Artificial Sequence
  source: /note="Description of Artificial Sequence: Synthetic peptide"
VRTSL

SEQ ID NO: 1347 - protein, 6 aa, Artificial Sequence
  source: /note="Description of Artificial Sequence: Synthetic peptide"
QAVRTS

SEQ ID NO: 1348 - protein, 6 aa, Artificial Sequence
  source: /note="Description of Artificial Sequence: Synthetic peptide"
AVRTSL

SEQ ID NO: 1349 - DNA, 33 bp, Artificial Sequence
  source: /note="Description of Artificial Sequence: Synthetic oligonucleotide"
gatgggactttggcggtgccttttaaggcacag

SEQ ID NO: 1350 - DNA, 33 bp, Artificial Sequence
  source: /note="Description of Artificial Sequence: Synthetic oligonucleotide"
gatgggacgttggcggtgccttttaaggcacag

SEQ ID NO: 1351 - DNA, 21 bp, Artificial Sequence
  source: /note="Description of Artificial Sequence: Synthetic oligonucleotide"
caggcggttaggacgtctttg

SEQ ID NO: 1352 - DNA, 27 bp, Artificial Sequence
  source: /note="Description of Artificial Sequence: Synthetic oligonucleotide"
caggtcttcacggactcagactatcag

SEQ ID NO: 1353 - DNA, 32 bp, Artificial Sequence
  source: /note="Description of Artificial Sequence: Synthetic oligonucleotide"
caagtaaaacctctacaaatgtggtaaaatcg

SEQ ID NO: 1354 - DNA, 36 bp, Artificial Sequence
  source: /note="Description of Artificial Sequence: Synthetic oligonucleotide"
actcatcgaccaatacttgtactatctctctagaac

SEQ ID NO: 1355 - DNA, 26 bp, Artificial Sequence
  source: /note="Description of Artificial Sequence: Synthetic oligonucleotide"
ggaagtattccttggttttgaaccca

SEQ ID NO: 1356 - DNA, 23 bp, Artificial Sequence
  source: /note="Description of Artificial Sequence: Synthetic oligonucleotide"
ggtcgcggttcttgtttgtggat

SEQ ID NO: 1357 - DNA, 24 bp, Artificial Sequence
  source: /note="Description of Artificial Sequence: Synthetic oligonucleotide"
cgaccttgaagcgcatgaactcct

SEQ ID NO: 1358 - DNA, 83 bp, Artificial Sequence
  source: /note="Description of Artificial Sequence: Synthetic oligonucleotide"
  modified_base (42)..(43): a, c, t, or g
  modified_base (45)..(46): a, c, t, or g
  modified_base (48)..(49): a, c, t, or g
  modified_base (51)..(52): a, c, t, or g
  modified_base (54)..(55): a, c, t, or g
  modified_base (57)..(58): a, c, t, or g
  modified_base (60)..(61): a, c, t, or g
gtattccttggttttgaacccaaccggtctgcgcctgtgcmnnmnnmnnmnnmnnmnnmnnttgggcactctggtggtttgtc

SEQ ID NO: 1359 - DNA, 64 bp, Artificial Sequence
  source: /note="Description of Artificial Sequence: Synthetic oligonucleotide"
  modified_base (36)..(37): a, c, t, or g
  modified_base (39)..(40): a, c, t, or g
  modified_base (42)..(43): a, c, t, or g
gtattccttggttttgaacccaaccggtctgcgcmnnmnnmnnaaaaggcaccgccaaagtttg

SEQ ID NO: 1360 - DNA, 70 bp, Artificial Sequence
  source: /note="Description of Artificial Sequence: Synthetic oligonucleotide"
  modified_base (42)..(43): a, c, t, or g
  modified_base (45)..(46): a, c, t, or g
  modified_base (48)..(49): a, c, t, or g
gtattccttggttttgaacccaaccggtctgcgcctgtgcmnnmnnmnncaccgccaaagtttgggcact

SEQ ID NO: 1361 - DNA, 77 bp, Artificial Sequence
  source: /note="Description of Artificial Sequence: Synthetic oligonucleotide"
  modified_base (48)..(49): a, c, t, or g
  modified_base (51)..(52): a, c, t, or g
  modified_base (54)..(55): a, c, t, or g
gtattccttggttttgaacccaaccggtctgcgcctgtgccttaaamnnmnnmnncaaagtttgggcactctggtgg

SEQ ID NO: 1362 - DNA, 83 bp, Artificial Sequence
  source: /note="Description of Artificial Sequence: Synthetic oligonucleotide"
  modified_base (54)..(55): a, c, t, or g
  modified_base (57)..(58): a, c, t, or g
  modified_base (60)..(61): a, c, t, or g
gtattccttggttttgaacccaaccggtctgcgcctgtgccttaaaaggcacmnnmnnmnnttgggcactctggtggtttgtg

SEQ ID NO: 1363 - DNA, 21 bp, Artificial Sequence
  source: /note="Description of Artificial Sequence: Synthetic oligonucleotide"
cttgcgaaggagcggctttcg

SEQ ID NO: 1364 - protein, 10 aa, Artificial Sequence
  source: /note="Description of Artificial Sequence: Synthetic peptide"
VNLTWSRASG

SEQ ID NO: 1365 - protein, 14 aa, Artificial Sequence
  source: /note="Description of Artificial Sequence: Synthetic peptide"
EFCINHRGYWVCGD

SEQ ID NO: 1366 - protein, 11 aa, Artificial Sequence
  source: /note="Description of Artificial Sequence: Synthetic peptide"
EDGQVMDVDLS

SEQ ID NO: 1367 - protein, 9 aa, Artificial Sequence
  source: /note="Description of Artificial Sequence: Synthetic peptide"
EKQRNGTLT

SEQ ID NO: 1368 - protein, 17 aa, Artificial Sequence
  source: /note="Description of Artificial Sequence: Synthetic peptide"
TYQCRVTHPHLPRALMR

SEQ ID NO: 1369 - protein, 14 aa, Artificial Sequence
  source: /note="Description of Artificial Sequence: Synthetic peptide"
RHSTTQPRKTKGSG

SEQ ID NO: 1370 - protein, 13 aa, Artificial Sequence
  source: /note="Description of Artificial Sequence: Synthetic peptide"
DSNPRGVSAYLSR

SEQ ID NO: 1371 - protein, 12 aa, Artificial Sequence
  source: /note="Description of Artificial Sequence: Synthetic peptide"
TITCLWDLAPSK

SEQ ID NO: 1372 - protein, 10 aa, Artificial Sequence
  source: /note="Description of Artificial Sequence: Synthetic peptide"
KTKGSGFFVF

SEQ ID NO: 1373 - protein, 12 aa, Artificial Sequence
  source: /note="Description of Artificial Sequence: Synthetic peptide"
THPHLPRALMRS

SEQ ID NO: 1374 - protein, 23 aa, Artificial Sequence
  source: /note="Description of Artificial Sequence: Synthetic peptide"
GETYQCRVTHPHLPRALMRSTTK

SEQ ID NO: 1375 - protein, 8 aa, Artificial Sequence
  source: /note="Description of Artificial Sequence: Synthetic peptide"
LPRALMRS

SEQ ID NO: 1376 - protein, 8 aa, Artificial Sequence
  source: /note="Description of Artificial Sequence: Synthetic peptide"
INHRGYWV

SEQ ID NO: 1377 - protein, 12 aa, Artificial Sequence
  source: /note="Description of Artificial Sequence: Synthetic peptide"
CDAGSVRTNAPD

SEQ ID NO: 1378 - protein, 17 aa, Artificial Sequence
  source: /note="Description of Artificial Sequence: Synthetic peptide"
AKAVSNLTESRSESLQS

SEQ ID NO: 1379 - protein, 13 aa, Artificial Sequence
  source: /note="Description of Artificial Sequence: Synthetic peptide"
SLTGDEFKKVLET

SEQ ID NO: 1380 - protein, 11 aa, Artificial Sequence
  source: /note="Description of Artificial Sequence: Synthetic peptide"
REAVAYRFEED

SEQ ID NO: 1381 - protein, 10 aa, Artificial Sequence
  source: /note="Description of Artificial Sequence: Synthetic peptide"
INPEIITLDG

SEQ ID NO: 1382 - protein, 15 aa, Artificial Sequence
  source: /note="Description of Artificial Sequence: Synthetic peptide"
DISVTGAPVITATYL

SEQ ID NO: 1383 - protein, 12 aa, Artificial Sequence
  source: /note="Description of Artificial Sequence: Synthetic peptide"
DISVTGAPVITA

SEQ ID NO: 1384 - protein, 17 aa, Artificial Sequence
  source: /note="Description of Artificial Sequence: Synthetic peptide"
PKTVSNLTESSSESVQS

SEQ ID NO: 1385 - protein, 13 aa, Artificial Sequence
  source: /note="Description of Artificial Sequence: Synthetic peptide"
SLMGDEFKAVLET

SEQ ID NO: 1386 - protein, 11 aa, Artificial Sequence
  source: /note="Description of Artificial Sequence: Synthetic peptide"
QHSVAYTFEED

SEQ ID NO: 1387 - protein, 10 aa, Artificial Sequence
  source: /note="Description of Artificial Sequence: Synthetic peptide"
INPEIITRDG

SEQ ID NO: 1388 - protein, 15 aa, Artificial Sequence
  source: /note="Description of Artificial Sequence: Synthetic peptide"
DISLTGDPVITASYL

SEQ ID NO: 1389 - protein, 12 aa, Artificial Sequence
  source: /note="Description of Artificial Sequence: Synthetic peptide"
DISLTGDPVITA

SEQ ID NO: 1390 - protein, 11 aa, Artificial Sequence
  source: /note="Description of Artificial Sequence: Synthetic peptide"
DQSIDFEIDSA

SEQ ID NO: 1391 - protein, 20 aa, Artificial Sequence
  source: /note="Description of Artificial Sequence: Synthetic peptide"
KNVSEDLPLPTFSPTLLGDS

SEQ ID NO: 1392 - protein, 11 aa, Artificial Sequence
  source: /note="Description of Artificial Sequence: Synthetic peptide"
KNVSEDLPLPT

SEQ ID NO: 1393 - protein, 12 aa, Artificial Sequence
  source: /note="Description of Artificial Sequence: Synthetic peptide"
CDSGRVRTDAPD

SEQ ID NO: 1394 - protein, 14 aa, Artificial Sequence
  source: /note="Description of Artificial Sequence: Synthetic peptide"
FPEHLLVDFLQSLS

SEQ ID NO: 1395 - protein, 9 aa, Artificial Sequence
  source: /note="Description of Artificial Sequence: Synthetic peptide"
DAEFRHDSG

SEQ ID NO: 1396 - protein, 16 aa, Artificial Sequence
  source: /note="Description of Artificial Sequence: Synthetic peptide"
HYAAAQWDFGNTMCQL

SEQ ID NO: 1397 - protein, 13 aa, Artificial Sequence
  source: /note="Description of Artificial Sequence: Synthetic peptide"
YAAQWDFGNTMCQ

SEQ ID NO: 1398 - protein, 10 aa, Artificial Sequence
  source: /note="Description of Artificial Sequence: Synthetic peptide"
RSQKEGLHYT

SEQ ID NO: 1399 - protein, 19 aa, Artificial Sequence
  source: /note="Description of Artificial Sequence: Synthetic peptide"
SSRTPSDKPVAHWANPQAE

SEQ ID NO: 1400 - protein, 15 aa, Artificial Sequence
  source: /note="Description of Artificial Sequence: Synthetic peptide"
SRTPSDKPVAHWANP

SEQ ID NO: 1401 - protein, 9 aa, Artificial Sequence
  source: /note="Description of Artificial Sequence: Synthetic peptide"
SSRTPSDKP

SEQ ID NO: 1402 - protein, 14 aa, Artificial Sequence
  source: /note="Description of Artificial Sequence: Synthetic peptide"
NADGNVDYHMNSVP

SEQ ID NO: 1403 - protein, 11 aa, Artificial Sequence
  source: /note="Description of Artificial Sequence: Synthetic peptide"
DGNVDYHMNSV

SEQ ID NO: 1404 - protein, 16 aa, Artificial Sequence
  source: /note="Description of Artificial Sequence: Synthetic peptide"
RSFKEFLQSSLRALRQ

SEQ ID NO: 1405 - protein, 11 aa, Artificial Sequence
  source: /note="Description of Artificial Sequence: Synthetic peptide"
FKEFLQSSLRA

SEQ ID NO: 1406 - protein, 10 aa, Artificial Sequence
  source: /note="Description of Artificial Sequence: Synthetic peptide"
QMWAPQWGPD

SEQ ID NO: 1407 - protein, 6 aa, Artificial Sequence
  source: /note="Description of Artificial Sequence: Synthetic peptide"
RGNRQA

SEQ ID NO: 1408 - protein, 6 aa, Artificial Sequence
  source: /note="Description of Artificial Sequence: Synthetic peptide"
SSSTDP

SEQ ID NO: 1409 - protein, 6 aa, Artificial Sequence
  source: /note="Description of Artificial Sequence: Synthetic peptide"
SSNTAP

SEQ ID NO: 1410 - protein, 6 aa, Artificial Sequence
  source: /note="Description of Artificial Sequence: Synthetic peptide"
SNSNLP

SEQ ID NO: 1411 - protein, 6 aa, Artificial Sequence
  source: /note="Description of Artificial Sequence: Synthetic peptide"
SSTTAP

SEQ ID NO: 1412 - protein, 6 aa, Artificial Sequence
  source: /note="Description of Artificial Sequence: Synthetic peptide"
AANTAA

SEQ ID NO: 1413 - protein, 6 aa, Artificial Sequence
  source: /note="Description of Artificial Sequence: Synthetic peptide"
QQNTAP

SEQ ID NO: 1414 - protein, 6 aa, Artificial Sequence
  source: /note="Description of Artificial Sequence: Synthetic peptide"
SAQAQA

SEQ ID NO: 1415 - protein, 6 aa, Artificial Sequence
  source: /note="Description of Artificial Sequence: Synthetic peptide"
QANTGP

SEQ ID NO: 1416 - protein, 6 aa, Artificial Sequence
  source: /note="Description of Artificial Sequence: Synthetic peptide"
NATTAP

SEQ ID NO: 1417 - protein, 6 aa, Artificial Sequence
  source: /note="Description of Artificial Sequence: Synthetic peptide"
SSTAGP

SEQ ID NO: 1418 - protein, 6 aa, Artificial Sequence
  source: /note="Description of Artificial Sequence: Synthetic peptide"
QQNTAA

SEQ ID NO: 1419 - protein, 6 aa, Artificial Sequence
  source: /note="Description of Artificial Sequence: Synthetic peptide"
PSTAGP

SEQ ID NO: 1420 - protein, 6 aa, Artificial Sequence
  source: /note="Description of Artificial Sequence: Synthetic peptide"
NQNTAP

SEQ ID NO: 1421 - protein, 6 aa, Artificial Sequence
  source: /note="Description of Artificial Sequence: Synthetic peptide"
QAANAP

SEQ ID NO: 1422 - protein, 6 aa, Artificial Sequence
  source: /note="Description of Artificial Sequence: Synthetic peptide"
SIVGLP

SEQ ID NO: 1423 - protein, 6 aa, Artificial Sequence
  source: /note="Description of Artificial Sequence: Synthetic peptide"
AASTAA

SEQ ID NO: 1424 - protein, 6 aa, Artificial Sequence
  source: /note="Description of Artificial Sequence: Synthetic peptide"
SQNTTA

SEQ ID NO: 1425 - protein, 6 aa, Artificial Sequence
  source: /note="Description of Artificial Sequence: Synthetic peptide"
QQDTAP

SEQ ID NO: 1426 - protein, 6 aa, Artificial Sequence
  source: /note="Description of Artificial Sequence: Synthetic peptide"
QTNTGP

SEQ ID NO: 1427 - protein, 6 aa, Artificial Sequence
  source: /note="Description of Artificial Sequence: Synthetic peptide"
QTNGAP

SEQ ID NO: 1428 - protein, 6 aa, Artificial Sequence
  source: /note="Description of Artificial Sequence: Synthetic peptide"
QQNAAP

SEQ ID NO: 1429 - protein, 6 aa, Artificial Sequence
  source: /note="Description of Artificial Sequence: Synthetic peptide"
AANTQA

SEQ ID NO: 1430 - protein, 6 aa, Artificial Sequence
  source: /note="Description of Artificial Sequence: Synthetic peptide"
NGRAHA

SEQ ID NO: 1431 - protein, 7 aa, Artificial Sequence
  source: /note="Description of Artificial Sequence: Synthetic peptide"
QPEHSST

SEQ ID NO: 1432 - protein, 7 aa, Artificial Sequence
  source: /note="Description of Artificial Sequence: Synthetic peptide"
VNTANST

SEQ ID NO: 1433 - protein, 7 aa, Artificial Sequence
  source: /note="Description of Artificial Sequence: Synthetic peptide"
HGPMQKS

SEQ ID NO: 1434 - protein, 7 aa, Artificial Sequence
  source: /note="Description of Artificial Sequence: Synthetic peptide"
PHKPPLA

SEQ ID NO: 1435 - protein, 7 aa, Artificial Sequence
  source: /note="Description of Artificial Sequence: Synthetic peptide"
IKNNEMW

SEQ ID NO: 1436 - protein, 7 aa, Artificial Sequence
  source: /note="Description of Artificial Sequence: Synthetic peptide"
RNLDTPM

SEQ ID NO: 1437 - protein, 7 aa, Artificial Sequence
  source: /note="Description of Artificial Sequence: Synthetic peptide"
VDSHRQS

SEQ ID NO: 1438 - protein, 7 aa, Artificial Sequence
  source: /note="Description of Artificial Sequence: Synthetic peptide"
YDSKTKT

SEQ ID NO: 1439 - protein, 7 aa, Artificial Sequence
  source: /note="Description of Artificial Sequence: Synthetic peptide"
SQLPHQK

SEQ ID NO: 1440 - protein, 7 aa, Artificial Sequence
  source: /note="Description of Artificial Sequence: Synthetic peptide"
STMQQNT

SEQ ID NO: 1441 - protein, 7 aa, Artificial Sequence
  source: /note="Description of Artificial Sequence: Synthetic peptide"
TERYMTQ

SEQ ID NO: 1442 - protein, 7 aa, Artificial Sequence
  source: /note="Description of Artificial Sequence: Synthetic peptide"
DASLSTS

SEQ ID NO: 1443 - protein, 7 aa, Artificial Sequence
  source: /note="Description of Artificial Sequence: Synthetic peptide"
DLPNKKT

SEQ ID NO: 1444 - protein, 7 aa, Artificial Sequence
  source: /note="Description of Artificial Sequence: Synthetic peptide"
DLTAARL

SEQ ID NO: 1445 - protein, 7 aa, Artificial Sequence
  source: /note="Description of Artificial Sequence: Synthetic peptide"
EPHQFNY

SEQ ID NO: 1446 - protein, 7 aa, Artificial Sequence
  source: /note="Description of Artificial Sequence: Synthetic peptide"
EPQSNHT

SEQ ID NO: 1447 - protein, 7 aa, Artificial Sequence
  source: /note="Description of Artificial Sequence: Synthetic peptide"
MSSWPSQ

SEQ ID NO: 1448 - protein, 7 aa, Artificial Sequence
  source: /note="Description of Artificial Sequence: Synthetic peptide"
NPKHNAT

SEQ ID NO: 1449 - protein, 7 aa, Artificial Sequence
  source: /note="Description of Artificial Sequence: Synthetic peptide"
PDGMRTT

SEQ ID NO: 1450 - protein, 7 aa, Artificial Sequence
  source: /note="Description of Artificial Sequence: Synthetic peptide"
PNNNKTT

SEQ ID NO: 1451 - protein, 7 aa, Artificial Sequence
  source: /note="Description of Artificial Sequence: Synthetic peptide"
QSTTHDS

SEQ ID NO: 1452 - protein, 7 aa, Artificial Sequence
  source: /note="Description of Artificial Sequence: Synthetic peptide"
TGSKQKQ

SEQ ID NO: 1453 - protein, 7 aa, Artificial Sequence
  source: /note="Description of Artificial Sequence: Synthetic peptide"
SLKHQAL

SEQ ID NO: 1454 - protein, 7 aa, Artificial Sequence
  source: /note="Description of Artificial Sequence: Synthetic peptide"
SPIDGEQ

SEQ ID NO: 1455 - protein, 8 aa, Artificial Sequence
  source: /note="Description of Artificial Sequence: Synthetic peptide"
WIFPWIQL

SEQ ID NO: 1456 - protein, 9 aa, Artificial Sequence
  source: /note="Description of Artificial Sequence: Synthetic peptide"
CDCRGDCFC

SEQ ID NO: 1457 - protein, 5 aa, Artificial Sequence
  source: /note="Description of Artificial Sequence: Synthetic peptide"
CNGRC

SEQ ID NO: 1458 - protein, 7 aa, Artificial Sequence
  source: /note="Description of Artificial Sequence: Synthetic peptide"
CPRECES

SEQ ID NO: 1459 - protein, 10 aa, Artificial Sequence
  source: /note="Description of Artificial Sequence: Synthetic peptide"
CTTHWGFTLC

SEQ ID NO: 1460 - protein, 9 aa, Artificial Sequence
  source: /note="Description of Artificial Sequence: Synthetic peptide"
CGRRAGGSC

SEQ ID NO: 1461 - protein, 9 aa, Artificial Sequence
  source: /note="Description of Artificial Sequence: Synthetic peptide"
CKGGRAKDC

SEQ ID NO: 1462 - protein, 9 aa, Artificial Sequence
  source: /note="Description of Artificial Sequence: Synthetic peptide"
CVPELGHEC

SEQ ID NO: 1463 - protein, 9 aa, Artificial Sequence
  source: /note="Description of Artificial Sequence: Synthetic peptide"
CRRETAWAK

SEQ ID NO: 1464 - protein, 14 aa, Artificial Sequence
  source: /note="Description of Artificial Sequence: Synthetic peptide"
VSWFSHRYSPFAVS

SEQ ID NO: 1465 - protein, 13 aa, Artificial Sequence
  source: /note="Description of Artificial Sequence: Synthetic peptide"
GYRDGYAGPILYN

SEQ ID NO: 1466 - protein, 7 aa, Artificial Sequence
  source: /note="Description of Artificial Sequence: Synthetic peptide"
  MOD_RES (1)..(3): Any amino acid
  MOD_RES (5)..(7): Any amino acid
XXXYXXX

SEQ ID NO: 1467 - protein, 4 aa, Artificial Sequence
  source: /note="Description of Artificial Sequence: Synthetic peptide"
  VARIANT (2)..(2): /replace="Met"
  SITE (1)..(4): /note="Variant residues given in the sequence have no preference with respect to those in the annotations for variant positions"
YENW

SEQ ID NO: 1468 - protein, 7 aa, Artificial Sequence
  source: /note="Description of Artificial Sequence: Synthetic peptide"
RPLPPLP

SEQ ID NO: 1469 - protein, 7 aa, Artificial Sequence
  source: /note="Description of Artificial Sequence: Synthetic peptide"
APPLPPR

SEQ ID NO: 1470 - protein, 12 aa, Artificial Sequence
  source: /note="Description of Artificial Sequence: Synthetic peptide"
DVFYPYPYASGS

SEQ ID NO: 1471 - protein, 6 aa, Artificial Sequence
  source: /note="Description of Artificial Sequence: Synthetic peptide"
MYWYPY

SEQ ID NO: 1472 - protein, 12 aa, Artificial Sequence
  source: /note="Description of Artificial Sequence: Synthetic peptide"
DITWDQLWDLMK

SEQ ID NO: 1473 - protein, 8 aa, Artificial Sequence
  source: /note="Description of Artificial Sequence: Synthetic peptide"
  VARIANT (5)..(5): /replace="Leu
  SITE (1)..(8): /note="Variant residues given in the sequence have no preference with respect to those in the annotations for variant positions"
CWDDGWLC

SEQ ID NO: 1474 - protein, 14 aa, Artificial Sequence
  source: /note="Description of Artificial Sequence: Synthetic peptide"
EWCEYLGGYLRCYA

SEQ ID NO: 1475 - protein, 14 aa, Artificial Sequence
  source: /note="Description of Artificial Sequence: Synthetic peptide"
  MOD_RES (2)..(2): Any amino acid
  MOD_RES (4)..(5): Any amino acid
  MOD_RES (8)..(8): Any amino acid
  MOD_RES (11)..(11): Any amino acid
  MOD_RES (13)..(13): Any amino acid
YXCXXGPXTWXCXP

SEQ ID NO: 1476 - protein, 14 aa, Artificial Sequence
  source: /note="Description of Artificial Sequence: Synthetic peptide"
IEGPTLRQWLAARA

SEQ ID NO: 1477 - protein, 5 aa, Artificial Sequence
  source: /note="Description of Artificial Sequence: Synthetic peptide"
  MOD_RES (3)..(4): Any amino acid
  VARIANT (5)..(5): /replace="Trp" or "Phe" or "His
  SITE (1)..(5): /note="Variant residues given in the sequence have no preference with respect to those in the annotations for variant positions"
LWXXY

SEQ ID NO: 1478 - protein, 7 aa, Artificial Sequence
  source: /note="Description of Artificial Sequence: Synthetic peptide"
  MOD_RES (1)..(1): Any amino acid
  MOD_RES (3)..(4): Any amino acid
XFXXYLW

SEQ ID NO: 1479 - protein, 13 aa, Artificial Sequence
  source: /note="Description of Artificial Sequence: Synthetic peptide"
SSIISHFRWGLCD

SEQ ID NO: 1480 - protein, 13 aa, Artificial Sequence
  source: /note="Description of Artificial Sequence: Synthetic peptide"
MSRPACPPNDKYE

SEQ ID NO: 1481 - protein, 8 aa, Artificial Sequence
  source: /note="Description of Artificial Sequence: Synthetic peptide"
CLRSGRGC

SEQ ID NO: 1482 - protein, 9 aa, Artificial Sequence
  source: /note="Description of Artificial Sequence: Synthetic peptide"
CHWMFSPWC

SEQ ID NO: 1483 - protein, 4 aa, Artificial Sequence
  source: /note="Description of Artificial Sequence: Synthetic peptide"
  MOD_RES (2)..(3): Any amino acid
WXXF

SEQ ID NO: 1484 - protein, 8 aa, Artificial Sequence
  source: /note="Description of Artificial Sequence: Synthetic peptide"
CSSRLDAC

SEQ ID NO: 1485 - protein, 7 aa, Artificial Sequence
  source: /note="Description of Artificial Sequence: Synthetic peptide"
CLPVASC

SEQ ID NO: 1486 - protein, 13 aa, Artificial Sequence
  source: /note="Description of Artificial Sequence: Synthetic peptide"
CGFECVRQCPERC

SEQ ID NO: 1487 - protein, 13 aa, Artificial Sequence
  source: /note="Description of Artificial Sequence: Synthetic peptide"
CVALCREACGEGC

SEQ ID NO: 1488 - protein, 9 aa, Artificial Sequence
  source: /note="Description of Artificial Sequence: Synthetic peptide"
SWCEPGWCR

SEQ ID NO: 1489 - protein, 7 aa, Artificial Sequence
  source: /note="Description of Artificial Sequence: Synthetic peptide"
YSGKWGW

SEQ ID NO: 1490 - protein, 7 aa, Artificial Sequence
  source: /note="Description of Artificial Sequence: Synthetic peptide"
GLSGGRS

SEQ ID NO: 1491 - protein, 7 aa, Artificial Sequence
  source: /note="Description of Artificial Sequence: Synthetic peptide"
LMLPRAD

SEQ ID NO: 1492 - protein, 9 aa, Artificial Sequence
  source: /note="Description of Artificial Sequence: Synthetic peptide"
CSCFRDVCC

SEQ ID NO: 1493 - protein, 9 aa, Artificial Sequence
  source: /note="Description of Artificial Sequence: Synthetic peptide"
CRDVVSVIC

SEQ ID NO: 1494 - protein, 6 aa, Artificial Sequence
  source: /note="Description of Artificial Sequence: Synthetic peptide"
MARSGL

SEQ ID NO: 1495 - protein, 6 aa, Artificial Sequence
  source: /note="Description of Artificial Sequence: Synthetic peptide"
MARAKE

SEQ ID NO: 1496 - protein, 6 aa, Artificial Sequence
  source: /note="Description of Artificial Sequence: Synthetic peptide"
MSRTMS

SEQ ID NO: 1497 - protein, 6 aa, Artificial Sequence
  source: /note="Description of Artificial Sequence: Synthetic peptide"
KCCYSL

SEQ ID NO: 1498 - protein, 14 aa, Artificial Sequence
  source: /note="Description of Artificial Sequence: Synthetic peptide"
MYWGDSHWLQYWYE

SEQ ID NO: 1499 - protein, 7 aa, Artificial Sequence
  source: /note="Description of Artificial Sequence: Synthetic peptide"
MQLPLAT

SEQ ID NO: 1500 - protein, 4 aa, Artificial Sequence
  source: /note="Description of Artificial Sequence: Synthetic peptide"
EWLS

SEQ ID NO: 1501 - protein, 4 aa, Artificial Sequence
  source: /note="Description of Artificial Sequence: Synthetic peptide"
SNEW

SEQ ID NO: 1502 - protein, 4 aa, Artificial Sequence
  source: /note="Description of Artificial Sequence: Synthetic peptide"
TNYL

SEQ ID NO: 1503 - protein, 12 aa, Artificial Sequence
  source: /note="Description of Artificial Sequence: Synthetic peptide"
WDLAWMFRLPVG

SEQ ID NO: 1504 - protein, 13 aa, Artificial Sequence
  source: /note="Description of Artificial Sequence: Synthetic peptide"
CTVALPGGYVRVC

SEQ ID NO: 1505 - protein, 13 aa, Artificial Sequence
  source: /note="Description of Artificial Sequence: Synthetic peptide"
CVAYCIEHHCWTC

SEQ ID NO: 1506 - protein, 12 aa, Artificial Sequence
  source: /note="Description of Artificial Sequence: Synthetic peptide"
CVFAHNYDYLVC

SEQ ID NO: 1507 - protein, 10 aa, Artificial Sequence
  source: /note="Description of Artificial Sequence: Synthetic peptide"
CVFTSNYAFC

SEQ ID NO: 1508 - protein, 7 aa, Artificial Sequence
  source: /note="Description of Artificial Sequence: Synthetic peptide"
VHSPNKK

SEQ ID NO: 1509 - protein, 7 aa, Artificial Sequence
  source: /note="Description of Artificial Sequence: Synthetic peptide"
CRGDGWC

SEQ ID NO: 1510 - protein, 6 aa, Artificial Sequence
  source: /note="Description of Artificial Sequence: Synthetic peptide"
  MOD_RES (1)..(1): Any amino acid
  MOD_RES (6)..(6): Any amino acid
XRGCDX

SEQ ID NO: 1511 - protein, 4 aa, Artificial Sequence
  source: /note="Description of Artificial Sequence: Synthetic peptide"
  MOD_RES (2)..(3): Any amino acid
  VARIANT (4)..(4): /replace="Thr
  SITE (1)..(4): /note="Variant residues given in the sequence have no preference with respect to those in the annotations for variant positions"
PXXS

SEQ ID NO: 1512 - protein, 11 aa, Artificial Sequence
  source: /note="Description of Artificial Sequence: Synthetic peptide"
SGKGPRQITAL

SEQ ID NO: 1513 - protein, 14 aa, Artificial Sequence
  source: /note="Description of Artificial Sequence: Synthetic peptide"
  VARIANT (10)..(10): /replace="Gln"
  VARIANT (11)..(11): /replace="Ala"
  VARIANT (12)..(12): /replace="Tyr"
  VARIANT (13)..(13): /replace="Val" or "Met" or "Arg"
  VARIANT (14)..(14): /replace="Lys
  SITE (1)..(14): /note="Variant residues given in the sequence have no preference with respect to those in the annotations for variant positions"
AAAAAAAAAANLTR

SEQ ID NO: 1514 - protein, 6 aa, Artificial Sequence
  source: /note="Description of Artificial Sequence: Synthetic peptide"
VYMSPF

SEQ ID NO: 1515 - protein, 7 aa, Artificial Sequence
  source: /note="Description of Artificial Sequence: Synthetic peptide"
ATWLPPR

SEQ ID NO: 1516 - protein, 12 aa, Artificial Sequence
  source: /note="Description of Artificial Sequence: Synthetic peptide"
HTMYYHHYQHHL

SEQ ID NO: 1517 - protein, 19 aa, Artificial Sequence
  source: /note="Description of Artificial Sequence: Synthetic peptide"
SEVGCRAGPLQWLCEKYFG

SEQ ID NO: 1518 - protein, 18 aa, Artificial Sequence
  source: /note="Description of Artificial Sequence: Synthetic peptide"
CGLLPVGRPDRNVWRWLC

SEQ ID NO: 1519 - protein, 15 aa, Artificial Sequence
  source: /note="Description of Artificial Sequence: Synthetic peptide"
CKGQCDRFKGLPWEC

SEQ ID NO: 1520 - protein, 5 aa, Artificial Sequence
  source: /note="Description of Artificial Sequence: Synthetic peptide"
SGRSA

SEQ ID NO: 1521 - protein, 4 aa, Artificial Sequence
  source: /note="Description of Artificial Sequence: Synthetic peptide"
WGFP

SEQ ID NO: 1522 - protein, 17 aa, Artificial Sequence
  source: /note="Description of Artificial Sequence: Synthetic peptide"
AEPMPHSLNFSQYLWYT

SEQ ID NO: 1523 - protein, 6 aa, Artificial Sequence
  source: /note="Description of Artificial Sequence: Synthetic peptide"
  VARIANT (4)..(4): /replace="Phe
  SITE (1)..(6): /note="Variant residues given in the sequence have no preference with respect to those in the annotations for variant positions"
WAYWSP

SEQ ID NO: 1524 - protein, 7 aa, Artificial Sequence
  source: /note="Description of Artificial Sequence: Synthetic peptide"
IELLQAR

SEQ ID NO: 1525 - protein, 16 aa, Artificial Sequence
  source: /note="Description of Artificial Sequence: Synthetic peptide"
AYTKCSRQWRTCMTTH

SEQ ID NO: 1526 - protein, 15 aa, Artificial Sequence
  source: /note="Description of Artificial Sequence: Synthetic peptide"
PQNSKIPGPTFLDPH

SEQ ID NO: 1527 - protein, 15 aa, Artificial Sequence
  source: /note="Description of Artificial Sequence: Synthetic peptide"
SMEPALPDWWWKMFK

SEQ ID NO: 1528 - protein, 16 aa, Artificial Sequence
  source: /note="Description of Artificial Sequence: Synthetic peptide"
ANTPCGPYTHDCPVKR

SEQ ID NO: 1529 - protein, 12 aa, Artificial Sequence
  source: /note="Description of Artificial Sequence: Synthetic peptide"
TACHQHVRMVRP

SEQ ID NO: 1530 - protein, 12 aa, Artificial Sequence
  source: /note="Description of Artificial Sequence: Synthetic peptide"
VPWMEPAYQRFL

SEQ ID NO: 1531 - protein, 8 aa, Artificial Sequence
  source: /note="Description of Artificial Sequence: Synthetic peptide"
DPRATPGS

SEQ ID NO: 1532 - protein, 12 aa, Artificial Sequence
  source: /note="Description of Artificial Sequence: Synthetic peptide"
FRPNRAQDYNTN

SEQ ID NO: 1533 - protein, 9 aa, Artificial Sequence
  source: /note="Description of Artificial Sequence: Synthetic peptide"
CTKNSYLMC

SEQ ID NO: 1534 - protein, 11 aa, Artificial Sequence
  source: /note="Description of Artificial Sequence: Synthetic peptide"
  VARIANT (2)..(2): /replace="Arg"
  VARIANT (3)..(3): /replace="Arg"
  VARIANT (5)..(5): /replace="Asn"
  MOD_RES (6)..(7): Any amino acid
  VARIANT (9)..(9): /replace="Val
  SITE (1)..(11): /note="Variant residues given in the sequence have no preference with respect to those in the annotations for variant positions"
CQLTGXXGAGC

SEQ ID NO: 1535 - protein, 9 aa, Artificial Sequence
  source: /note="Description of Artificial Sequence: Synthetic peptide"
CPIEDRPMC

SEQ ID NO: 1536 - protein, 12 aa, Artificial Sequence
  source: /note="Description of Artificial Sequence: Synthetic peptide"
HEWSYLAPYPWF

SEQ ID NO: 1537 - protein, 9 aa, Artificial Sequence
  source: /note="Description of Artificial Sequence: Synthetic peptide"
MCPKHPLGC

SEQ ID NO: 1538 - protein, 15 aa, Artificial Sequence
  source: /note="Description of Artificial Sequence: Synthetic peptide"
RMWPSSTVNLSAGRR

SEQ ID NO: 1539 - protein, 20 aa, Artificial Sequence
  source: /note="Description of Artificial Sequence: Synthetic peptide"
SAKTAVSQRVWLPSHRGGEP

SEQ ID NO: 1540 - protein, 20 aa, Artificial Sequence
  source: /note="Description of Artificial Sequence: Synthetic peptide"
KSREHVNNSACPSKRITAAL

SEQ ID NO: 1541 - protein, 4 aa, Artificial Sequence
  source: /note="Description of Artificial Sequence: Synthetic peptide"
EGFR

SEQ ID NO: 1542 - protein, 6 aa, Artificial Sequence
  source: /note="Description of Artificial Sequence: Synthetic peptide"
AGLGVR

SEQ ID NO: 1543 - protein, 15 aa, Artificial Sequence
  source: /note="Description of Artificial Sequence: Synthetic peptide"
GTRQGHTMRLGVSDG

SEQ ID NO: 1544 - protein, 15 aa, Artificial Sequence
  source: /note="Description of Artificial Sequence: Synthetic peptide"
IAGLATPGWSHWLAL

SEQ ID NO: 1545 - protein, 7 aa, Artificial Sequence
  source: /note="Description of Artificial Sequence: Synthetic peptide"
SMSIARL

SEQ ID NO: 1546 - protein, 7 aa, Artificial Sequence
  source: /note="Description of Artificial Sequence: Synthetic peptide"
HTFEPGV

SEQ ID NO: 1547 - protein, 15 aa, Artificial Sequence
  source: /note="Description of Artificial Sequence: Synthetic peptide"
NTSLKRISNKRIRRK

SEQ ID NO: 1548 - protein, 15 aa, Artificial Sequence
  source: /note="Description of Artificial Sequence: Synthetic peptide"
LRIKRKRRKRKKTRK

SEQ ID NO: 1549 - DNA, 21 bp, Adeno-associated virus 2
agcvvmdcaggarscascaac

SEQ ID NO: 1550 - protein, 7 aa, Artificial Sequence
  source: /note="Description of Artificial Sequence: Synthetic peptide"
SDSGASN

SEQ ID NO: 1551 - protein, 7 aa, Artificial Sequence
  source: /note="Description of Artificial Sequence: Synthetic peptide"
SPSGASN

SEQ ID NO: 1552 - protein, 7 aa, Artificial Sequence
  source: /note="Description of Artificial Sequence: Synthetic peptide"
SHSGASN

SEQ ID NO: 1553 - protein, 7 aa, Artificial Sequence
  source: /note="Description of Artificial Sequence: Synthetic peptide"
SRSGASN

SEQ ID NO: 1554 - protein, 7 aa, Artificial Sequence
  source: /note="Description of Artificial Sequence: Synthetic peptide"
SKSGASN

SEQ ID NO: 1555 - protein, 7 aa, Artificial Sequence
  source: /note="Description of Artificial Sequence: Synthetic peptide"
SNSGASN

SEQ ID NO: 1556 - protein, 7 aa, Artificial Sequence
  source: /note="Description of Artificial Sequence: Synthetic peptide"
SGSGASN

SEQ ID NO: 1557 - protein, 7 aa, Artificial Sequence
  source: /note="Description of Artificial Sequence: Synthetic peptide"
SASGASN

SEQ ID NO: 1558 - protein, 7 aa, Artificial Sequence
  source: /note="Description of Artificial Sequence: Synthetic peptide"
SESGTSN

SEQ ID NO: 1559 - protein, 7 aa, Artificial Sequence
  source: /note="Description of Artificial Sequence: Synthetic peptide"
STTGGSN

SEQ ID NO: 1560 - protein, 7 aa, Artificial Sequence
  source: /note="Description of Artificial Sequence: Synthetic peptide"
SSAGSTN

SEQ ID NO: 1561 - protein, 6 aa, Artificial Sequence
  source: /note="Description of Artificial Sequence: Synthetic peptide"
NNDSQA

SEQ ID NO: 1562 - protein, 6 aa, Artificial Sequence
  source: /note="Description of Artificial Sequence: Synthetic peptide"
NNRNQA

SEQ ID NO: 1563 - protein, 6 aa, Artificial Sequence
  source: /note="Description of Artificial Sequence: Synthetic peptide"
NNNKQA

SEQ ID NO: 1564 - protein, 6 aa, Artificial Sequence
  source: /note="Description of Artificial Sequence: Synthetic peptide"
NAKRQA

SEQ ID NO: 1565 - protein, 6 aa, Artificial Sequence
  source: /note="Description of Artificial Sequence: Synthetic peptide"
NDEHQA

SEQ ID NO: 1566 - protein, 6 aa, Artificial Sequence
  source: /note="Description of Artificial Sequence: Synthetic peptide"
NTSQKA

SEQ ID NO: 1567 - protein, 25 aa, Artificial Sequence
  source: /note="Description of Artificial Sequence: Synthetic peptide"
YYLSRTNTPSGTDTQSRLVFSQAGA

SEQ ID NO: 1568 - protein, 25 aa, Artificial Sequence
  source: /note="Description of Artificial Sequence: Synthetic peptide"
YYLSRTNTDSGTETQSGLDFSQAGA

SEQ ID NO: 1569 - protein, 25 aa, Artificial Sequence
  source: /note="Description of Artificial Sequence: Synthetic peptide"
YYLSRTNTESGTPTQSALEFSQAGA

SEQ ID NO: 1570 - protein, 25 aa, Artificial Sequence
  source: /note="Description of Artificial Sequence: Synthetic peptide"
YYLSRTNTHSGTHTQSPLHFSQAGA

SEQ ID NO: 1571 - protein, 25 aa, Artificial Sequence
  source: /note="Description of Artificial Sequence: Synthetic peptide"
YYLSRTNTSSGTITISHLIFSQAGA

SEQ ID NO: 1572 - protein, 25 aa, Artificial Sequence
  source: /note="Description of Artificial Sequence: Synthetic peptide"
YYLSRTNTRSGIMTKSSLMFSQAGA

SEQ ID NO: 1573 - protein, 25 aa, Artificial Sequence
  source: /note="Description of Artificial Sequence: Synthetic peptide"
YYLSRTNTKSGRKTLSNLSFSQAGA

SEQ ID NO: 1574 - protein, 25 aa, Artificial Sequence
  source: /note="Description of Artificial Sequence: Synthetic peptide"
YYLSRTNDGSGPVTPSKLRFSQRGA

SEQ ID NO: 1575 - protein, 25 aa, Artificial Sequence
  source: /note="Description of Artificial Sequence: Synthetic peptide"
YYLSRTNAASGHATHSDLKFSQPGA

SEQ ID NO: 1576 - protein, 25 aa, Artificial Sequence
  source: /note="Description of Artificial Sequence: Synthetic peptide"
YYLSRTNGQAGSLTMSELGFSQVGA

SEQ ID NO: 1577 - protein, 25 aa, Artificial Sequence
  source: /note="Description of Artificial Sequence: Synthetic peptide"
YYLSRTNSTGGNQTTSQLLFSQLSA

SEQ ID NO: 1578 - protein, 25 aa, Artificial Sequence
  source: /note="Description of Artificial Sequence: Synthetic peptide"
YFLSRTNNNTGLNTNSTLNFSQGRA

SEQ ID NO: 1579 - protein, 16 aa, Artificial Sequence
  source: /note="Description of Artificial Sequence: Synthetic peptide"
SKTGADNNNSEYSWTG

SEQ ID NO: 1580 - protein, 16 aa, Artificial Sequence
  source: /note="Description of Artificial Sequence: Synthetic peptide"
SKTDADNNNSEYSWTG

SEQ ID NO: 1581 - protein, 16 aa, Artificial Sequence
  source: /note="Description of Artificial Sequence: Synthetic peptide"
SKTEADNNNSEYSWTG

SEQ ID NO: 1582 - protein, 16 aa, Artificial Sequence
  source: /note="Description of Artificial Sequence: Synthetic peptide"
SKTPADNNNSEYSWTG

SEQ ID NO: 1583 - protein, 16 aa, Artificial Sequence
  source: /note="Description of Artificial Sequence: Synthetic peptide"
SKTHADNNNSEYSWTG

SEQ ID NO: 1584 - protein, 16 aa, Artificial Sequence
  source: /note="Description of Artificial Sequence: Synthetic peptide"
SKTQADNNNSEYSWTG

SEQ ID NO: 1585 - protein, 16 aa, Artificial Sequence
  source: /note="Description of Artificial Sequence: Synthetic peptide"
SKTIADNNNSEYSWTG

SEQ ID NO: 1586 - protein, 16 aa, Artificial Sequence
  source: /note="Description of Artificial Sequence: Synthetic peptide"
SKTMADNNNSEYSWTG

SEQ ID NO: 1587 - protein, 16 aa, Artificial Sequence
  source: /note="Description of Artificial Sequence: Synthetic peptide"
SKTRADNNNSEYSWTG

SEQ ID NO: 1588 - protein, 16 aa, Artificial Sequence
  source: /note="Description of Artificial Sequence: Synthetic peptide"
SKTNADNNNSEYSWTG

SEQ ID NO: 1589 - protein, 16 aa, Artificial Sequence
  source: /note="Description of Artificial Sequence: Synthetic peptide"
SKTVGRNNNSEYSWTG

SEQ ID NO: 1590 - protein, 16 aa, Artificial Sequence
  source: /note="Description of Artificial Sequence: Synthetic peptide"
SKTADRNNNSEYSWTG

SEQ ID NO: 1591 - protein, 16 aa, Artificial Sequence
  source: /note="Description of Artificial Sequence: Synthetic peptide"
SKKLSQNNNSKYSWQG

SEQ ID NO: 1592 - protein, 16 aa, Artificial Sequence
  source: /note="Description of Artificial Sequence: Synthetic peptide"
SKPTTGNNNSDYSWPG

SEQ ID NO: 1593 - protein, 16 aa, Artificial Sequence
  source: /note="Description of Artificial Sequence: Synthetic peptide"
STQKNENNNSNYSWPG

SEQ ID NO: 1594 - protein, 8 aa, Artificial Sequence
  source: /note="Description of Artificial Sequence: Synthetic peptide"
HKDDEGKF

SEQ ID NO: 1595 - protein, 8 aa, Artificial Sequence
  source: /note="Description of Artificial Sequence: Synthetic peptide"
HKDDNRKF

SEQ ID NO: 1596 - protein, 8 aa, Artificial Sequence
  source: /note="Description of Artificial Sequence: Synthetic peptide"
HKDDTNKF

SEQ ID NO: 1597 - protein, 8 aa, Artificial Sequence
  source: /note="Description of Artificial Sequence: Synthetic peptide"
HEDSDKNF

SEQ ID NO: 1598 - protein, 8 aa, Artificial Sequence
  source: /note="Description of Artificial Sequence: Synthetic peptide"
HRDGADSF

SEQ ID NO: 1599 - protein, 8 aa, Artificial Sequence
  source: /note="Description of Artificial Sequence: Synthetic peptide"
HGDNKSRF

SEQ ID NO: 1600 - protein, 14 aa, Artificial Sequence
  source: /note="Description of Artificial Sequence: Synthetic peptide"
KQGSEKTNVDFEEV

SEQ ID NO: 1601 - protein, 14 aa, Artificial Sequence
  source: /note="Description of Artificial Sequence: Synthetic peptide"
KQGSEKTNVDSEEV

SEQ ID NO: 1602 - protein, 14 aa, Artificial Sequence
  source: /note="Description of Artificial Sequence: Synthetic peptide"
KQGSEKTNVDVEEV

SEQ ID NO: 1603 - protein, 14 aa, Artificial Sequence
  source: /note="Description of Artificial Sequence: Synthetic peptide"
KQGSDKTNVDDAGV

SEQ ID NO: 1604 - protein, 14 aa, Artificial Sequence
  source: /note="Description of Artificial Sequence: Synthetic peptide"
KQGSSKTNVDPREV

SEQ ID NO: 1605 - protein, 14 aa, Artificial Sequence
  source: /note="Description of Artificial Sequence: Synthetic peptide"
KQGSRKTNVDHKQV

SEQ ID NO: 1606 - protein, 14 aa, Artificial Sequence
  source: /note="Description of Artificial Sequence: Synthetic peptide"
KQGSKGGNVDTNRV

SEQ ID NO: 1607 - protein, 14 aa, Artificial Sequence
  source: /note="Description of Artificial Sequence: Synthetic peptide"
KQGSGEANVDNGDV

SEQ ID NO: 1608 - protein, 14 aa, Artificial Sequence
  source: /note="Description of Artificial Sequence: Synthetic peptide"
KQDAAADNIDYDHV

SEQ ID NO: 1609 - protein, 14 aa, Artificial Sequence
  source: /note="Description of Artificial Sequence: Synthetic peptide"
KQSGTRSNAAASSV

SEQ ID NO: 1610 - protein, 14 aa, Artificial Sequence
  source: /note="Description of Artificial Sequence: Synthetic peptide"
KENTNTNDTELTNV

SEQ ID NO: 1611 - protein, 14 aa, Artificial Sequence
  source: /note="Description of Artificial Sequence: Synthetic peptide"
QRGNNVAATADVNT

SEQ ID NO: 1612 - protein, 14 aa, Artificial Sequence
  source: /note="Description of Artificial Sequence: Synthetic peptide"
QRGNNEAATADVNT

SEQ ID NO: 1613 - protein, 14 aa, Artificial Sequence
  source: /note="Description of Artificial Sequence: Synthetic peptide"
QRGNNPAATADVNT

SEQ ID NO: 1614 - protein, 14 aa, Artificial Sequence
  source: /note="Description of Artificial Sequence: Synthetic peptide"
QRGNNHAATADVNT

SEQ ID NO: 1615 - protein, 14 aa, Artificial Sequence
  source: /note="Description of Artificial Sequence: Synthetic peptide"
QEENNIAATPGVNT

SEQ ID NO: 1616 - protein, 14 aa, Artificial Sequence
  source: /note="Description of Artificial Sequence: Synthetic peptide"
QPPNNMAATHEVNT

SEQ ID NO: 1617 - protein, 14 aa, Artificial Sequence
  source: /note="Description of Artificial Sequence: Synthetic peptide"
QHHNNSAATTIVNT

SEQ ID NO: 1618 - protein, 14 aa, Artificial Sequence
  source: /note="Description of Artificial Sequence: Synthetic peptide"
QTTNNRAAFNMVET

SEQ ID NO: 1619 - protein, 14 aa, Artificial Sequence
  source: /note="Description of Artificial Sequence: Synthetic peptide"
QKKNNNAASKKVAT

SEQ ID NO: 1620 - protein, 14 aa, Artificial Sequence
  source: /note="Description of Artificial Sequence: Synthetic peptide"
QGGNNKAADDAVKT

SEQ ID NO: 1621 - protein, 14 aa, Artificial Sequence
  source: /note="Description of Artificial Sequence: Synthetic peptide"
QAAKGGAADDAVKT

SEQ ID NO: 1622 - protein, 14 aa, Artificial Sequence
  source: /note="Description of Artificial Sequence: Synthetic peptide"
QDDRAAAANESVDT

SEQ ID NO: 1623 - protein, 14 aa, Artificial Sequence
  source: /note="Description of Artificial Sequence: Synthetic peptide"
QQQHDDAAYQRVHT

SEQ ID NO: 1624 - protein, 14 aa, Artificial Sequence
  source: /note="Description of Artificial Sequence: Synthetic peptide"
QSSSSLAAVSTVQT

SEQ ID NO: 1625 - protein, 14 aa, Artificial Sequence
  source: /note="Description of Artificial Sequence: Synthetic peptide"
QNNQTTAAIRNVTT

SEQ ID NO: 1626 - protein, 12 aa, Artificial Sequence
  source: /note="Description of Artificial Sequence: Synthetic peptide"
NYNKKSDNVDFT

SEQ ID NO: 1627 - protein, 12 aa, Artificial Sequence
  source: /note="Description of Artificial Sequence: Synthetic peptide"
NYNKKSENVDFT

SEQ ID NO: 1628 - protein, 12 aa, Artificial Sequence
  source: /note="Description of Artificial Sequence: Synthetic peptide"
NYNKKSLNVDFT

SEQ ID NO: 1629 - protein, 12 aa, Artificial Sequence
  source: /note="Description of Artificial Sequence: Synthetic peptide"
NYNKKSPNVDFT

SEQ ID NO: 1630 - protein, 12 aa, Artificial Sequence
  source: /note="Description of Artificial Sequence: Synthetic peptide"
NYSKKSHCVDFT

SEQ ID NO: 1631 - protein, 11 aa, Artificial Sequence
  source: /note="Description of Artificial Sequence: Synthetic peptide"
NYRKTIYVDFT

SEQ ID NO: 1632 - protein, 11 aa, Artificial Sequence
  source: /note="Description of Artificial Sequence: Synthetic peptide"
NYKEKKDVHFT

SEQ ID NO: 1633 - protein, 11 aa, Artificial Sequence
  source: /note="Description of Artificial Sequence: Synthetic peptide"
NYGHRAIVQFT

SEQ ID NO: 1634 - protein, 11 aa, Artificial Sequence
  source: /note="Description of Artificial Sequence: Synthetic peptide"
NYANHQFVVCT

SEQ ID NO: 1635 - protein, 12 aa, Artificial Sequence
  source: /note="Description of Artificial Sequence: Synthetic peptide"
NYDDDPTGVLLT

SEQ ID NO: 1636 - protein, 11 aa, Artificial Sequence
  source: /note="Description of Artificial Sequence: Synthetic peptide"
NYDDPTGVLLT

SEQ ID NO: 1637 - protein, 11 aa, Artificial Sequence
  source: /note="Description of Artificial Sequence: Synthetic peptide"
NFEQQNSVEWT

SEQ ID NO: 1638 - protein, 7 aa, Artificial Sequence
  source: /note="Description of Artificial Sequence: Synthetic peptide"
SQSGASN

SEQ ID NO: 1639 - protein, 6 aa, Artificial Sequence
  source: /note="Description of Artificial Sequence: Synthetic peptide"
NNGSQA

SEQ ID NO: 1640 - protein, 25 aa, Artificial Sequence
  source: /note="Description of Artificial Sequence: Synthetic peptide"
YYLSRTNTPSGTTTWSRLQFSQAGA

SEQ ID NO: 1641 - protein, 16 aa, Artificial Sequence
  source: /note="Description of Artificial Sequence: Synthetic peptide"
SKTSADNNNSEYSWTG

SEQ ID NO: 1642 - protein, 8 aa, Artificial Sequence
  source: /note="Description of Artificial Sequence: Synthetic peptide"
HKDDEEKF

SEQ ID NO: 1643 - protein, 14 aa, Artificial Sequence
  source: /note="Description of Artificial Sequence: Synthetic peptide"
KQGSEKTNVDIEEV

SEQ ID NO: 1644 - protein, 14 aa, Artificial Sequence
  source: /note="Description of Artificial Sequence: Synthetic peptide"
QRGNNQAATADVNT

SEQ ID NO: 1645 - protein, 12 aa, Artificial Sequence
  source: /note="Description of Artificial Sequence: Synthetic peptide"
NYNKKSVNVDFT

SEQ ID NO: 1646 - protein, 42 aa, Artificial Sequence
  source: /note="Description of Artificial Sequence: Synthetic polypeptide"
SQSGASNYNTPSGTTTQSRLQFSTSADNNNSEYSWTGATKYH

SEQ ID NO: 1647 - protein, 42 aa, Artificial Sequence
  source: /note="Description of Artificial Sequence: Synthetic polypeptide"
SASGASNFNSEGGSLTQSSLGFSTDGENNNSDFSWTGATKYH

SEQ ID NO: 1648 - protein, 42 aa, Artificial Sequence
  source: /note="Description of Artificial Sequence: Synthetic polypeptide"
SQSGASNYNTPSGTTTQSRLQFSTDGENNNSDFSWTGATKYH

SEQ ID NO: 1649 - protein, 42 aa, Artificial Sequence
  source: /note="Description of Artificial Sequence: Synthetic polypeptide"
SASGASNYNTPSGTTTQSRLQFSTSADNNNSEFSWPGATTYH

SEQ ID NO: 1650 - protein, 42 aa, Artificial Sequence
  source: /note="Description of Artificial Sequence: Synthetic polypeptide"
SQSGASNFNSEGGSLTQSSLGFSTDGENNNSDFSWTGATKYH

SEQ ID NO: 1651 - protein, 42 aa, Artificial Sequence
  source: /note="Description of Artificial Sequence: Synthetic polypeptide"
SASGASNYNTPSGSLTQSSLGFSTDGENNNSDFSWTGATKYH

SEQ ID NO: 1652 - protein, 42 aa, Artificial Sequence
  source: /note="Description of Artificial Sequence: Synthetic polypeptide"
SQSGASNYNTPSGTTTQSRLQFSTSADNNNSDFSWTGATKYH

SEQ ID NO: 1653 - protein, 42 aa, Artificial Sequence
  source: /note="Description of Artificial Sequence: Synthetic polypeptide"
SGAGASNFNSEGGSLTQSSLGFSTDGENNNSDFSWTGATKYH

SEQ ID NO: 1654 - protein, 7 aa, Artificial Sequence
  source: /note="Description of Artificial Sequence: Synthetic peptide"
SGAGASN

SEQ ID NO: 1655 - protein, 15 aa, Artificial Sequence
  source: /note="Description of Artificial Sequence: Synthetic peptide"
NSEGGSLTQSSLGFS

SEQ ID NO: 1656 - protein, 11 aa, Artificial Sequence
  source: /note="Description of Artificial Sequence: Synthetic peptide"
TDGENNNSDFS

SEQ ID NO: 1657 - protein, 10 aa, Artificial Sequence
  source: /note="Description of Artificial Sequence: Synthetic peptide"
SEFSWPGATT

SEQ ID NO: 1658 - protein, 13 aa, Artificial Sequence
  source: /note="Description of Artificial Sequence: Synthetic peptide"
TSADNNNSDFSWT

SEQ ID NO: 1659 - protein, 8 aa, Artificial Sequence
  source: /note="Description of Artificial Sequence: Synthetic peptide"
SQSGASNY

SEQ ID NO: 1660 - protein, 15 aa, Artificial Sequence
  source: /note="Description of Artificial Sequence: Synthetic peptide"
NTPSGTTTQSRLQFS

SEQ ID NO: 1661 - protein, 19 aa, Artificial Sequence
  source: /note="Description of Artificial Sequence: Synthetic peptide"
TSADNNNSEYSWTGATKYH

SEQ ID NO: 1662 - protein, 8 aa, Artificial Sequence
  source: /note="Description of Artificial Sequence: Synthetic peptide"
SASGASNF

SEQ ID NO: 1663 - protein, 19 aa, Artificial Sequence
  source: /note="Description of Artificial Sequence: Synthetic peptide"
TDGENNNSDFSWTGATKYH

SEQ ID NO: 1664 - protein, 8 aa, Artificial Sequence
  source: /note="Description of Artificial Sequence: Synthetic peptide"
SASGASNY

SEQ ID NO: 1665 - protein, 19 aa, Artificial Sequence
  source: /note="Description of Artificial Sequence: Synthetic peptide"
TSADNNNSEFSWPGATTYH

SEQ ID NO: 1666 - protein, 15 aa, Artificial Sequence
  source: /note="Description of Artificial Sequence: Synthetic peptide"
NTPSGSLTQSSLGFS

SEQ ID NO: 1667 - protein, 19 aa, Artificial Sequence
  source: /note="Description of Artificial Sequence: Synthetic peptide"
TSADNNNSDFSWTGATKYH

SEQ ID NO: 1668 - protein, 8 aa, Artificial Sequence
  source: /note="Description of Artificial Sequence: Synthetic peptide"
SGAGASNF

SEQ ID NO: 1669 - DNA, 48 bp, Artificial Sequence
  source: /note="Description of Artificial Sequence: Synthetic oligonucleotide"
  modified_base (20)..(20): a, c, t, or g
  modified_base (35)..(35): a, c, t, or g
ctccagvvsvvsmrsrvcvnsgcagctdhcvvsrnsgtcvmsacacaa

SEQ ID NO: 1670 - DNA, 48 bp, Artificial Sequence
  source: /note="Description of Artificial Sequence: Synthetic oligonucleotide"
ctccagagaggcaacagacaagcagctaccgcagatgtcaacacacaa

SEQ ID NO: 1671 - protein, 7 aa, Artificial Sequence
  source: /note="Description of Artificial Sequence: Synthetic peptide"
SAAGASN

SEQ ID NO: 1672 - protein, 24 aa, Artificial Sequence
  source: /note="Description of Artificial Sequence: Synthetic peptide"
YFLSRTNTESGSTTQSTLRFSQAG

SEQ ID NO: 1673 - protein, 13 aa, Artificial Sequence
  source: /note="Description of Artificial Sequence: Synthetic peptide"
SKTSADNNNSDFS

SEQ ID NO: 1674 - protein, 14 aa, Artificial Sequence
  source: /note="Description of Artificial Sequence: Synthetic peptide"
KQGSEKTDVDIDKV

SEQ ID NO: 1675 - protein, 7 aa, Artificial Sequence
  source: /note="Description of Artificial Sequence: Synthetic peptide"
STAGASN

SEQ ID NO: 1676 - protein, 24 aa, Artificial Sequence
  source: /note="Description of Artificial Sequence: Synthetic peptide"
YFLSRTNTTSGIETQSTLRFSQAG

SEQ ID NO: 1677 - protein, 13 aa, Artificial Sequence
  source: /note="Description of Artificial Sequence: Synthetic peptide"
SKTDGENNNSDFS

SEQ ID NO: 1678 - protein, 14 aa, Artificial Sequence
  source: /note="Description of Artificial Sequence: Synthetic peptide"
KQGAAADDVEIDGV

SEQ ID NO: 1679 - protein, 7 aa, Artificial Sequence
  source: /note="Description of Artificial Sequence: Synthetic peptide"
SEAGASN

SEQ ID NO: 1680 - protein, 24 aa, Artificial Sequence
  source: /note="Description of Artificial Sequence: Synthetic peptide"
YYLSRTNTPSGTTTQSRLQFSQAG

SEQ ID NO: 1681 - protein, 13 aa, Artificial Sequence
  source: /note="Description of Artificial Sequence: Synthetic peptide"
SKTSADNNNSEYS

SEQ ID NO: 1682 - protein, 14 aa, Artificial Sequence
  source: /note="Description of Artificial Sequence: Synthetic peptide"
KQGSEKTNVDIEKV

SEQ ID NO: 1683 - protein, 24 aa, Artificial Sequence
  source: /note="Description of Artificial Sequence: Synthetic peptide"
YFLSRTNDASGSDTKSTLLFSQAG

SEQ ID NO: 1684 - protein, 13 aa, Artificial Sequence
  source: /note="Description of Artificial Sequence: Synthetic peptide"
STTPSENNNSEYS

SEQ ID NO: 1685 - protein, 7 aa, Artificial Sequence
  source: /note="Description of Artificial Sequence: Synthetic peptide"
SAAGATN

SEQ ID NO: 1686 - protein, 24 aa, Artificial Sequence
  source: /note="Description of Artificial Sequence: Synthetic peptide"
YFLSRTNGEAGSATLSELRFSQAG

SEQ ID NO: 1687 - protein, 8 aa, Artificial Sequence
  source: /note="Description of Artificial Sequence: Synthetic peptide"
HGDDADRF

SEQ ID NO: 1688 - protein, 14 aa, Artificial Sequence
  source: /note="Description of Artificial Sequence: Synthetic peptide"
KQGAEKSDVEVDRV

SEQ ID NO: 1689 - protein, 14 aa, Artificial Sequence
  source: /note="Description of Artificial Sequence: Synthetic peptide"
KQDSGGDNIDIDQV

SEQ ID NO: 1690 - protein, 7 aa, Artificial Sequence
  source: /note="Description of Artificial Sequence: Synthetic peptide"
SDAGASN

SEQ ID NO: 1691 - protein, 24 aa, Artificial Sequence
  source: /note="Description of Artificial Sequence: Synthetic peptide"
YFLSRTNTEGGHDTQSTLRFSQAG

SEQ ID NO: 1692 - protein, 14 aa, Artificial Sequence
  source: /note="Description of Artificial Sequence: Synthetic peptide"
KEDGGGSDVAIDEV

SEQ ID NO: 1693 - protein, 7 aa, Artificial Sequence
  source: /note="Description of Artificial Sequence: Synthetic peptide"
SNAGASN

SEQ ID NO: 1694 - protein, 24 aa, Artificial Sequence
  source: /note="Description of Artificial Sequence: Synthetic peptide"
YFLSRTNGEAGSATLSELRFSQPG

SEQ ID NO: 1695 - DNA, 21 bp, Artificial Sequence
  source: /note="Description of Artificial Sequence: Synthetic oligonucleotide"
agcvvmdcaggarscascaac

SEQ ID NO: 1696 - DNA, 18 bp, Artificial Sequence
  source: /note="Description of Artificial Sequence: Synthetic oligonucleotide"
aacracrrsmrsmaggca

SEQ ID NO: 1697 - DNA, 24 bp, Artificial Sequence
  source: /note="Description of Artificial Sequence: Synthetic oligonucleotide"
cacrrggacrrcrmsrrsarsttt

SEQ ID NO: 1698 - DNA, 75 bp, Artificial Sequence
  source: /note="Description of Artificial Sequence: Synthetic oligonucleotide"
  modified_base (35)..(35): a, c, t, or g
tatttcttgagcagaacaaacrvcvvsrscggamncvhsacgmhstcavvscttvdsttttctcagsbcrgsgcg

SEQ ID NO: 1699 - DNA, 48 bp, Artificial Sequence
  source: /note="Description of Artificial Sequence: Synthetic oligonucleotide"
  modified_base (11)..(11): a, c, t, or g
tcaamammavnsrvcsrsaacaacaacagtrasttctcgtggmmagga

SEQ ID NO: 1700 - DNA, 42 bp, Artificial Sequence
  source: /note="Description of Artificial Sequence: Synthetic oligonucleotide"
  modified_base (31)..(31): a, c, t, or g
aagsaarrcrscrvsrvarvcratrycgmsnhcrvmvrsgtc

SEQ ID NO: 1701 - DNA, 42 bp, Artificial Sequence
  source: /note="Description of Artificial Sequence: Synthetic oligonucleotide"
  modified_base (17)..(17): a, c, t, or g
  modified_base (32)..(32): a, c, t, or g
cagvvsvvsmrsrvcvnsgcagctdhcvvsrnsgtcvmsaca

SEQ ID NO: 1702 - DNA, 33 bp, Artificial Sequence
  source: /note="Description of Artificial Sequence: Synthetic oligonucleotide"
aactwcrvsvasmvsvhsddtgtgswstksact

SEQ ID NO: 1703 - DNA, 30 bp, Artificial Sequence
  source: /note="Description of Artificial Sequence: Synthetic oligonucleotide"
ttgttgaacatcaccacgtgacgcacgttc

SEQ ID NO: 1704 - DNA, 30 bp, Artificial Sequence
  source: /note="Description of Artificial Sequence: Synthetic oligonucleotide"
tccccgtggttctactacataatgtggccg

SEQ ID NO: 1705 - DNA, 30 bp, Artificial Sequence
  source: /note="Description of Artificial Sequence: Synthetic oligonucleotide"
ttccacactccgttttggataatgttgaac

SEQ ID NO: 1706 - DNA, 30 bp, Artificial Sequence
  source: /note="Description of Artificial Sequence: Synthetic oligonucleotide"
agggacatccccagctccatgctgtggtcg

SEQ ID NO: 1707 - DNA, 30 bp, Artificial Sequence
  source: /note="Description of Artificial Sequence: Synthetic oligonucleotide"
agggacaacccctccgactcgccctaatcc

SEQ ID NO: 1708 - DNA, 30 bp, Artificial Sequence
  source: /note="Description of Artificial Sequence: Synthetic oligonucleotide"
tcctagtagaagacaccctctcactgcccg

SEQ ID NO: 1709 - DNA, 30 bp, Artificial Sequence
  source: /note="Description of Artificial Sequence: Synthetic oligonucleotide"
agtaccatgtacacccactctcccagtgcc

SEQ ID NO: 1710 - DNA, 30 bp, Artificial Sequence
  source: /note="Description of Artificial Sequence: Synthetic oligonucleotide"
atatggacgttcatgctgatcaccataccg

SEQ ID NO: 1711 - DNA, 30 bp, Artificial Sequence
  source: /note="Description of Artificial Sequence: Synthetic oligonucleotide"
agcaggagctccttggcctcagcgtgcgag

SEQ ID NO: 1712 - DNA, 30 bp, Artificial Sequence
  source: /note="Description of Artificial Sequence: Synthetic oligonucleotide"
acaagcagcttcactatgacaaccactgac

SEQ ID NO: 1713 - DNA, 284 bp, Artificial Sequence
  source: /note="Description of Artificial Sequence: Synthetic polynucleotide"
  modified_base (59)..(59): a, c, t, or g
  modified_base (244)..(244): a, c, t, or g
cagcctaggaactggcttcctggaccctgttaccgccagcagagagtctcaamammavnsrvcsrsaacaacaacagtrasttctcctggmmaggagctaccaagtaccacctcaatggcagagactctctggtgaatcccggaccagctatggcaagccacrrggacrrcrmsrrsarsttttttcctcagagcggggttctcatctttgggaagsaarrcrscrvsrvarvcratrycgmsnhcrvmvrsgtcatgattacagacgaagaggagatctggac

SEQ ID NO: 1714 - DNA, 34 bp, Artificial Sequence
  source: /note="Description of Artificial Sequence: Synthetic oligonucleotide"
tgggacaatggcggtcgtctctcagagttktkkt

SEQ ID NO: 1715 - DNA, 35 bp, Artificial Sequence
  source: /note="Description of Artificial Sequence: Synthetic oligonucleotide"
agaggacckktcctcgatggttcatggtggagtta

SEQ ID NO: 1716 - DNA, 31 bp, Artificial Sequence
  source: /note="Description of Artificial Sequence: Synthetic oligonucleotide"
ccacttagggcctggtcgataccgttcggtg

SEQ ID NO: 1717 - DNA, 32 bp, Artificial Sequence
  source: /note="Description of Artificial Sequence: Synthetic oligonucleotide"
tctcgccccaagagtagaaacccttcsttyyg

SEQ ID NO: 1718 - protein, 735 aa, Adeno-associated virus 2 [sequence omitted]

SEQ ID NO: 1719 - protein, 736 aa, Adeno-associated virus 4; identical to SEQ ID NO: 134

SEQ ID NO: 1720 - protein, 7 aa, Artificial Sequence
  source: /note="Description of Artificial Sequence: Synthetic peptide"
GSTPPPM

SEQ ID NO: 1721 - protein, 7 aa, Artificial Sequence
  source: /note="Description of Artificial Sequence: Synthetic peptide"
GETRAPL

SEQ ID NO: 1722 - protein, 6 aa, Artificial Sequence
  source: /note="Description of Artificial Sequence: Synthetic peptide"
SPAKFA

SEQ ID NO: 1723 - protein, 6 aa, Artificial Sequence
  source: /note="Description of Artificial Sequence: Synthetic peptide"
NKDKLN

SEQ ID NO: 1724 - DNA, 12 bp, Artificial Sequence
  source: /note="Description of Artificial Sequence: Synthetic oligonucleotide"
agaaagaggcga

SEQ ID NO: 1725 - DNA, 12 bp, Artificial Sequence
  source: /note="Description of Artificial Sequence: Synthetic oligonucleotide"
cgggccaagcgg

SEQ ID NO: 1726 - DNA, 54 bp, Artificial Sequence
  source: /note="Description of Artificial Sequence: Synthetic oligonucleotide"
gagggcagaggaagtcttctaacatgcggtgacgtggaggagaatcccggccct

SEQ ID NO: 1727 - DNA, 75 bp, Artificial Sequence
  source: /note="Description of Artificial Sequence: Synthetic oligonucleotide"
ggaagcggagtgaaacagactttgaattttgaccttctcaagttggcgggagacgtggagtccaaccctggacct

SEQ ID NO: 1728 - DNA, 66 bp, Artificial Sequence
  source: /note="Description of Artificial Sequence: Synthetic oligonucleotide"
ggaagcggagctactaacttcagcctgctgaagcaggctggagacgtggaggagaaccctggacct

SEQ ID NO: 1729 - DNA, 18 bp, Artificial Sequence
  source: /note="Description of Artificial Sequence: Synthetic oligonucleotide"
tccggaggcggcggcagc

SEQ ID NO: 1730 - DNA, 45 bp, Artificial Sequence
  source: /note="Description of Artificial Sequence: Synthetic oligonucleotide"
ggaggggggggttcgggtggcggcggaagtgggggcggtggttct

SEQ ID NO: 1731 - DNA, 75 bp, Artificial Sequence
  source: /note="Description of Artificial Sequence: Synthetic oligonucleotide"
ggcggaggtggctccggaggcggaggcagcggcggaggtgggtctggcggaggcgggtgcggcggaggtggctcc

SEQ ID NO: 1732 - DNA, 609 bp, Artificial Sequence
  source: /note="Description of Artificial Sequence: Synthetic polynucleotide"
aattccgcccctctcccccccccccctctccctcccccccccctaacgttactggccgaagccgcttggaataaggccggtgtgcgtttgtctatatgttattttccaccatattgccgtcttttggcaatgtgagggcccggaaacctggccctgtcttcttgacgagcattcctaggggtctttcccctctcgccaaaggaatgcaaggtctgttgaatgtcgtgaaggaagcagttcctctggaagcttcttgaagacaaacaacgtctgtagcgaccctttgcaggcagcggaaccccccacctggcgacaggtgcctctgcggccaaaagccacgtgtataagatacacctgcaaaggcggcacaaccccagtgccacgttgtgagttggatagttgtggaaagagtcaaatggctctcctcaagcgtattcaacaaggggctgaaggatgcccagaaggtaccccattgtatgggatctgatctggggcctcggtgcacatgctttacatgtgtttagtcgaggttaaaaaaacgtctaggccccccgaaccacggggacgtggttttcctttgaaaaacacgatgataatatggccacaacc

SEQ ID NO: 1733 - DNA, 623 bp, Artificial Sequence
  source: /note="Description of Artificial Sequence: Synthetic polynucleotide"
taacgaattccgcccctctcccccccccccctctccctcccccccccctaacgttactggccgaagccgcttggaataaggccggtgtgcgtttgtctatatgttattttccaccatattgccgtcttttggcaatgtgagggcccggaaacctggccctgtcttcttgacgagcattcctaggggtctttcccctctcgccaaaggaatgcaaggtctgttgaatgtcgtgaaggaagcagttcctctggaagcttcttgaagacaaacaacgtctgtagcgaccctttgcaggcagcggaaccccccacctggcgacaggtgcctctgcggccaaaagccacgtgtataagatacacctgcaaaggcggcacaaccccagtgccacgttgtgagttggatagttgtggaaagagtcaaatggctctcctcaagcgtattcaacaaggggctgaaggatgcccagaaggtaccccattgtatgggatctgatctggggcctcggtgcacatgctttacatgtgtttagtcgaggttaaaaaaacgtctaggccccccgaaccacggggacgtggttttcctttgaaaaacacgatgataatatggccacaaccgccgccacc

SEQ ID NO: 1734 - DNA, 54 bp, Artificial Sequence
  source: /note="Description of Artificial Sequence: Synthetic oligonucleotide"
gtggagaggaagtgctgcgtggagtgcccaccatgccctgcccctcctgtggcc

SEQ ID NO: 1735 - DNA, 108 bp, Artificial Sequence
  source: /note="Description of Artificial Sequence: Synthetic polynucleotide"
gagctcaaaaccccacttggtgacacaactcacacatgcccacggtgcccagagcccaaatcttgtgacacacctcccccgtgcccacggtgcccagcacctgaactc

SEQ ID NO: 1736 - DNA, 153 bp, Artificial Sequence
  source: /note="Description of Artificial Sequence: Synthetic polynucleotide"
gagctcaaaaccccacttggtgacacaactcacacatgcccacggtgcccagagcccaaatcttgtgacacacctcccccgtgcccacggtgcccagagcccaaatcttgtgacacacctcccccatgcccacggtgcccagcacctgaactc

SEQ ID NO: 1737 - DNA, 198 bp, Artificial Sequence
  source: /note="Description of Artificial Sequence: Synthetic polynucleotide"
gagctcaaaaccccacttggtgacacaactcacacatgcccacggtgcccagagcccaaatcttgtgacacacctcccccgtgcccacggtgcccagagcccaaatcttgtgacacacctcccccatgcccacggtgcccagagcccaaatcttgtgacacacctcccccgtgcccaaggtgcccagcacctgaactc

SEQ ID NO: 1738 - DNA, 45 bp, Artificial Sequence
  source: /note="Description of Artificial Sequence: Synthetic oligonucleotide"
gtgcccagggattgtggttgtaagccttgcatatgtacagtccca

SEQ ID NO: 1739 - DNA, 18 bp, Artificial Sequence
  source: /note="Description of Artificial Sequence: Synthetic oligonucleotide"
gtgcccagggattgtggt

SEQ ID NO: 1740 - protein, 536 aa, Homo sapiens
MEFSSPSREECPKPLSRVSIMAGSLTGLLLLQAVSWASGARPCIPKSFGYSSVVCVCNATYCDSFDPPTFPALGTFSRYESTRSGRRMELSMGPIQANHTGTGLLLTLQPEQKFQKVKGFGGAMTDAAALNILALSPPAQNLLLKSYFSEEGIGYNIIRVPMASCDFSIRTYTYADTPDDFQLHNFSLPEEDTKLKIPLIHRALQLAQRPVSLLASPWTSPTWLKTNGAVNGKGSLKGQPGDIYHQTWARYFVKFLDAYAEHKLQFWAVTAENEPSAGLLSGYPFQCLGFTPEHQRDFIARDLGPTLANSTHHNVRLLMLDDQRLLLPHWAKVVLTDPEAAKYVHGIAVHWYLDFLAPAKATLGETHRLFPNTMLFASEACVGSKFWEQSVRLGSWDRGMQYSHSIITNLLYHVVGWTDWNLALNPEGGPNWVRNFVDSPIIVDITKDTFYKQPMFYHLGHFSKFIPEGSQRVGLVASQKNDLDAVALMHPDGSAVVVVLNRSSKDVPLTIKDPAVGFLETISPGYSIHTYLWRRQ

SEQ ID NO: 1741 - DNA, 2291 bp, Homo sapiens
ggaattacttgcagggctaacctagtgcctatagctaaggcaggtacctgcatccttgtttttgtttagtggatcctctatccttcagagactctggaacccctgtggtcttctcttcatctaatgaccctgaggggatggagttttcaagtccttccagagaggaatgtcccaagcctttgagtagggtaagcatcatggctggcagcctcacaggattgcttctacttcaggcagtgtcgtgggcatcaggtgcccgcccctgcatccctaaaagcttcggctacagctcggtggtgtgtgtctgcaatgccacatactgtgactcctttgaccccccgacctttcctgcccttggtaccttcagccgctatgagagtacacgcagtgggcgacggatggagctgagtatggggcccatccaggctaatcacacgggcacaggcctgctactgaccctgcagccagaacagaagttccagaaagtgaagggatttggaggggccatgacagatgctgctgctctcaacatccttgccctgtcaccccctgcccaaaatttgctacttaaatcgtacttctctgaagaaggaatcggatataacatcatccgggtacccatggccagctgtgacttctccatccgcacctacacctatgcagacacccctgatgatttccagttgcacaacttcagcctcccagaggaagataccaagctcaagatacccctgattcaccgagccctgcagttggcccagcgtcccgtttcactccttgccagcccctggacatcacccacttggctcaagaccaatggagcggtgaatgggaaggggtcactcaagggacagcccggagacatctaccaccagacctgggccagatactttgtgaagttcctggatgcctatgctgagcacaagttacagttctgggcagtgacagctgaaaatgagccttctgctgggctgttgagtggataccccttccagtgcctgggcttcacccctgaacatcagcgagacttcattgcccgtgacctaggtcctaccctcgccaacagtactcaccacaatgtccgcctactcatgctggatgaccaacgcttgctgctgccccactgggcaaaggtggtactgacagacccagaagcagctaaatatgttcatggcattgctgtacattggtacctggactttctggctccagccaaagccaccctaggggagacacaccgcctgttccccaacaccatgctctttgcctcagaggcctgtgtgggctccaagttctgggagcagagtgtgcggctaggctcctgggatcgagggatgcagtacagccacagcatcatcacgaacctcctgtaccatgtggtcggctggaccgactggaaccttgccctgaaccccgaaggaggacccaattgggtgcgtaactttgtcgacagtcccatcattgtagacatcaccaaggacacgttttacaaacagcccatgttctaccaccttggccacttcagcaagttcattcctgagggctcccagagagtggggctggttgccagtcagaagaacgacctggacgcagtggcactgatgcatcccgatggctctgctgttgtggtcgtgctaaaccgctcctctaaggatgtgcctcttaccatcaaggatcctgctgtgggcttcctggagacaatctcacctggctactccattcacacctacctgtggcgtcgccagtgatggagcagatactcaaggaggcactgggctcagcctgggcattaaagggacagagtcagctcacacgctgtctgtgactaaagagggcacagcagggccagtgtgagcttacagcgacgtaagcccaggggcaatggtttgggtgactcactttcccctctaggtggtgccaggggctggaggcccctagaaaaagatcagtaagccccagtgtccccccagcccccatgcttatgtgaacatgcgctgtgtgctgcttgctttggaaactgggcctgggtccaggcctagggtgagctcactgtccgtacaaacacaagatcagggctgagggtaaggaaaagaagagactaggaaagctgggcccaaaactggagactgtttgtctttcctggagatgcagaactgggcccgtggagcagcagtgtcagcatcagggcggaagccttaaagcagcagcgggtgtgcccaggcacccagatgattcctatggcaccagccaggaaaaatggcagctcttaaaggagaaaatgtttgagccca

SEQ ID NO: 1742 - protein, 536 aa, Homo sapiens; identical to SEQ ID NO: 1740

SEQ ID NO: 1743 - DNA, 2344 bp, Homo sapiens
atcctgccttcagagtcttactgcgcggggccccagtctccagtcccgcccaggcgcctttgcaggctgcggtgggatttcgttttgcctccggttggggctgctgtttctcttcgccgacgtggatcctctatccttcagagactctggaacccctgtggtcttctcttcatctaatgaccctgaggggatggagttttcaagtccttccagagaggaatgtcccaagcctttgagtagggtaagcatcatggctggcagcctcacaggattgcttctacttcaggcagtgtcgtgggcatcaggtgcccgcccctgcatccctaaaagcttcggctacagctcggtggtgtgtgtctgcaatgccacatactgtgactcctttgaccccccgacctttcctgcccttggtaccttcagccgctatgagagtacacgcagtgggcgacggatggagctgagtatggggcccatccaggctaatcacacgggcacaggcctgctactgaccctgcagccagaacagaagttccagaaagtgaagggatttggaggggccatgacagatgctgctgctctcaacatccttgccctgtcaccccctgcccaaaatttgctacttaaatcgtacttctctgaagaaggaatcggatataacatcatccgggtacccatggccagctgtgacttctccatccgcacctacacctatgcagacacccctgatgatttccagttgcacaacttcagcctcccagaggaagataccaagctcaagatacccctgattcaccgagccctgcagttggcccagcgtcccgtttcactccttgccagcccctggacatcacccacttggctcaagaccaatggagcggtgaatgggaaggggtcactcaagggacagcccggagacatctaccaccagacctgggccagatactttgtgaagttcctggatgcctatgctgagcacaagttacagttctgggcagtgacagctgaaaatgagccttctgctgggctgttgagtggataccccttccagtgcctgggcttcacccctgaacatcagcgagacttcattgcccgtgacctaggtcctaccctcgccaacagtactcaccacaatgtccgcctactcatgctggatgaccaacgcttgctgctgccccactgggcaaaggtggtactgacagacccagaagcagctaaatatgttcatggcattgctgtacattggtacctggactttctggctccagccaaagccaccctaggggagacacaccgcctgttccccaacaccatgctctttgcctcagaggcctgtgtgggctccaagttctgggagcagagtgtgcggctaggctcctgggatcgagggatgcagtacagccacagcatcatcacgaacctcctgtaccatgtggtcggctggaccgactggaaccttgccctgaaccccgaaggaggacccaattgggtgcgtaactttgtcgacagtcccatcattgtagacatcaccaaggacacgttttacaaacagcccatgttctaccaccttggccacttcagcaagttcattcctgagggctcccagagagtggggctggttgccagtcagaagaacgacctggacgcagtggcactgatgcatcccgatggctctgctgttgtggtcgtgctaaaccgctcctctaaggatgtgcctcttaccatcaaggatcctgctgtgggcttcctggagacaatctcacctggctactccattcacacctacctgtggcgtcgccagtgatggagcagatactcaaggaggcactgggctcagcctgggcattaaagggacagagtcagctcacacgctgtctgtgactaaagagggcacagcagggccagtgtgagcttacagcgacgtaagcccaggggcaatggtttgggtgactcactttcccctctaggtggtgccaggggctggaggcccctagaaaaagatcagtaagccccagtgtccccccagcccccatgcttatgtgaacatgcgctgtgtgctgcttgctttggaaactgggcctgggtccaggcctagggtgagctcactgtccgtacaaacacaagatcagggctgagggtaaggaaaagaagagactaggaaagctgggcccaaaactggagactgtttgtctttcctggagatgcagaactgggcccgtggagcagcagtgtcagcatcagggcggaagccttaaagcagcagcgggtgtgcccaggcacccagatgattcctatggcaccagccaggaaaaatggcagctcttaaaggagaaaatgtttgagccca

SEQ ID NO: 1744 - protein, 536 aa, Homo sapiens; identical to SEQ ID NO: 1740

SEQ ID NO: 1745 - DNA, 2325 bp, Homo sapiens
atcctgccttcagagtcttactgcgcggggccccagtctccagtcccgcccaggcgcctttgcaggctgcggtgggatttcgttttgcctccggttggggctgctgtttctcttcgccgacgagactctggaacccctgtggtcttctcttcatctaatgaccctgaggggatggagttttcaagtccttccagagaggaatgtcccaagcctttgagtagggtaagcatcatggctggcagcctcacaggattgcttctacttcaggcagtgtcgtgggcatcaggtgcccgcccctgcatccctaaaagcttcggctacagctcggtggtgtgtgtctgcaatgccacatactgtgactcctttgaccccccgacctttcctgcccttggtaccttcagccgctatgagagtacacgcagtgggcgacggatggagctgagtatggggcccatccaggctaatcacacgggcacaggcctgctactgaccctgcagccagaacagaagttccagaaagtgaagggatttggaggggccatgacagatgctgctgctctcaacatccttgccctgtcaccccctgcccaaaatttgctacttaaatcgtacttctctgaagaaggaatcggatataacatcatccgggtacccatggccagctgtgacttctccatccgcacctacacctatgcagacacccctgatgatttccagttgcacaacttcagcctcccagaggaagataccaagctcaagatacccctgattcaccgagccctgcagttggcccagcgtcccgtttcactccttgccagcccctggacatcacccacttggctcaagaccaatggagcggtgaatgggaaggggtcactcaagggacagcccggagacatctaccaccagacctgggccagatactttgtgaagttcctggatgcctatgctgagcacaagttacagttctgggcagtgacagctgaaaatgagccttctgctgggctgttgagtggataccccttccagtgcctgggcttcacccctgaacatcagcgagacttcattgcccgtgacctaggtcctaccctcgccaacagtactcaccacaatgtccgcctactcatgctggatgaccaacgcttgctgctgccccactgggcaaaggtggtactgacagacccagaagcagctaaatatgttcatggcattgctgtacattggtacctggactttctggctccagccaaagccaccctaggggagacacaccgcctgttccccaacaccatgctctttgcctcagaggcctgtgtgggctccaagttctgggagcagagtgtgcggctaggctcctgggatcgagggatgcagtacagccacagcatcatcacgaacctcctgtaccatgtggtcggctggaccgactggaaccttgccctgaaccccgaaggaggacccaattgggtgcgtaactttgtcgacagtcccatcattgtagacatcaccaaggacacgttttacaaacagcccatgttctaccaccttggccacttcagcaagttcattcctgagggctcccagagagtggggctggttgccagtcagaagaacgacctggacgcagtggcactgatgcatcccgatggctctgctgttgtggtcgtgctaaaccgctcctctaaggatgtgcctcttaccatcaaggatcctgctgtgggcttcctggagacaatctcacctggctactccattcacacctacctgtggcgtcgccagtgatggagcagatactcaaggaggcactgggctcagcctgggcattaaagggacagagtcagctcacacgctgtctgtgactaaagagggcacagcagggccagtgtgagcttacagcgacgtaagcccaggggcaatggtttgggtgactcactttcccctctaggtggtgccaggggctggaggcccctagaaaaagatcagtaagccccagtgtccccccagcccccatgcttatgtgaacatgcgctgtgtgctgcttgctttggaaactgggcctgggtccaggcctagggtgagctcactgtccgtacaaacacaagatcagggctgagggtaaggaaaagaagagactaggaaagctgggcccaaaactggagactgtttgtctttcctggagatgcagaactgggcccgtggagcagcagtgtcagcatcagggcggaagccttaaagcagcagcgggtgtgcccaggcacccagatgattcctatggcaccagccaggaaaaatggcagctcttaaaggagaaaatgtttgagccca

SEQ ID NO: 1746 - protein, 449 aa, Homo sapiens
MELSMGPIQANHTGTGLLLTLQPEQKFQKVKGFGGAMTDAAALNILALSPPAQNLLLKSYFSEEGIGYNIIRVPMASCDFSIRTYTYADTPDDFQLHNFSLPEEDTKLKIPLIHRALQLAQRPVSLLASPWTSPTWLKTNGAVNGKGSLKGQPGDIYHQTWARYFVKFLDAYAEHKLQFWAVTAENEPSAGLLSGYPFQCLGFTPEHQRDFIARDLGPTLANSTHHNVRLLMLDDQRLLLPHWAKVVLTDPEAAKYVHGIAVHWYLDFLAPAKATLGETHRLFPNTMLFASEACVGSKFWEQSVRLGSWDRGMQYSHSIITNLLYHVVGWTDWNLALNPEGGPNWVRNFVDSPIIVDITKDTFYKQPMFYHLGHFSKFIPEGSQRVGLVASQKNDLDAVALMHPDGSAVVVVLNRSSKDVPLTIKDPAVGFLETISPGYSIHTYLWRRQ

SEQ ID NO: 1747 - DNA, 2161 bp, Homo sapiens
atcctgccttcagagtcttactgcgcggggccccagtctccagtcccgcccaggcgcctttgcaggctgcggtgggatttcgttttgcctccggttggggctgctgtttctcttcgccgacggtgcccgcccctgcatccctaaaagcttcggctacagctcggtggtgtgtgtctgcaatgccacatactgtgactcctttgaccccccgacctttcctgcccttggtaccttcagccgctatgagagtacacgcagtgggcgacggatggagctgagtatggggcccatccaggctaatcacacgggcacaggcctgctactgaccctgcagccagaacagaagttccagaaagtgaagggatttggaggggccatgacagatgctgctgctctcaacatccttgccctgtcaccccctgcccaaaatttgctacttaaatcgtacttctctgaagaaggaatcggatataacatcatccgggtacccatggccagctgtgacttctccatccgcacctacacctatgcagacacccctgatgatttccagttgcacaacttcagcctcccagaggaagataccaagctcaagatacccctgattcaccgagccctgcagttggcccagcgtcccgtttcactccttgccagcccctggacatcacccacttggctcaagaccaatggagcggtgaatgggaaggggtcactcaagggacagcccggagacatctaccaccagacctgggccagatactttgtgaagttcctggatgcctatgctgagcacaagttacagttctgggcagtgacagctgaaaatgagccttctgctgggctgttgagtggataccccttccagtgcctgggcttcacccctgaacatcagcgagacttcattgcccgtgacctaggtcctaccctcgccaacagtactcaccacaatgtccgcctactcatgctggatgaccaacgcttgctgctgccccactgggcaaaggtggtactgacagacccagaagcagctaaatatgttcatggcattgctgtacattggtacctggactttctggctccagccaaagccaccctaggggagacacaccgcctgttccccaacaccatgctctttgcctcagaggcctgtgtgggctccaagttctgggagcagagtgtgcggctaggctcctgggatcgagggatgcagtacagccacagcatcatcacgaacctcctgtaccatgtggtcggctggaccgactggaaccttgccctgaaccccgaaggaggacccaattgggtgcgtaactttgtcgacagtcccatcattgtagacatcaccaaggacacgttttacaaacagcccatgttctaccaccttggccacttcagcaagttcattcctgagggctcccagagagtggggctggttgccagtcagaagaacgacctggacgcagtggcactgatgcatcccgatggctctgctgttgtggtcgtgctaaaccgctcctctaaggatgtgcctcttaccatcaaggatcctgctgtgggcttcctggagacaatctcacctggctactccattcacacctacctgtggcgtcgccagtgatggagcagatactcaaggaggcactgggctcagcctgggcattaaagggacagagtcagctcacacgctgtctgtgactaaagagggcacagcagggccagtgtgagcttacagcgacgtaagcccaggggcaatggtttgggtgactcactttcccctctaggtggtgccaggggctggaggcccctagaaaaagatcagtaagccccagtgtccccccagcccccatgcttatgtgaacatgcgctgtgtgctgcttgctttggaaactgggcctgggtccaggcctagggtgagctcactgtccgtacaaacacaagatcagggctgagggtaaggaaaagaagagactaggaaagctgggcccaaaactggagactgtttgtctttcctggagatgcagaactgggcccgtggagcagcagtgtcagcatcagggcggaagccttaaagcagcagcgggtgtgcccaggcacccagatgattcctatggcaccagccaggaaaaatggcagctcttaaaggagaaaatgtttgagccca

SEQ ID NO: 1748 - protein, 487 aa, Homo sapiens
MEFSSPSREECPKPLSRVSIMAGSLTGLLLLQAVSWASGARPCIPKSFGYSSVVCVCNATYCDSFDPPTFPALGTFSRYESTRSGRRMELSMGPIQANHTGTGIGYNIIRVPMASCDFSIRTYTYADTPDDFQLHNFSLPEEDTKLKIPLIHRALQLAQRPVSLLASPWTSPTWLKTNGAVNGKGSLKGQPGDIYHQTWARYFVKFLDAYAEHKLQFWAVTAENEPSAGLLSGYPFQCLGFTPEHQRDFIARDLGPTLANSTHHNVRLLMLDDQRLLLPHWAKVVLTDPEAAKYVHGIAVHWYLDFLAPAKATLGETHRLFPNTMLFASEACVGSKFWEQSVRLGSWDRGMQYSHSIITNLLYHVVGWTDWNLALNPEGGPNWVRNFVDSPIIVDITKDTFYKQPMFYHLGHFSKFIPEGSQRVGLVASQKNDLDAVALMHPDGSAVVVVLNRSSKDVPLTIKDPAVGFLETISPGYSIHTYLWRRQ

SEQ ID NO: 1749 - DNA, 2144 bp, Homo sapiens
ggaattacttgcagggctaacctagtgcctatagctaaggcaggtacctgcatccttgtttttgtttagtggatcctctatccttcagagactctggaacccctgtggtcttctcttcatctaatgaccctgaggggatggagttttcaagtccttccagagaggaatgtcccaagcctttgagtagggtaagcatcatggctggcagcctcacaggattgcttctacttcaggcagtgtcgtgggcatcaggtgcccgcccctgcatccctaaaagcttcggctacagctcggtggtgtgtgtctgcaatgccacatactgtgactcctttgaccccccgacctttcctgcccttggtaccttcagccgctatgagagtacacgcagtgggcgacggatggagctgagtatggggcccatccaggctaatcacacgggcacaggaatcggatataacatcatccgggtacccatggccagctgtgacttctccatccgcacctacacctatgcagacacccctgatgatttccagttgcacaacttcagcctcccagaggaagataccaagctcaagatacccctgattcaccgagccctgcagttggcccagcgtcccgtttcactccttgccagcccctggacatcacccacttggctcaagaccaatggagcggtgaatgggaaggggtcactcaagggacagcccggagacatctaccaccagacctgggccagatactttgtgaagttcctggatgcctatgctgagcacaagttacagttctgggcagtgacagctgaaaatgagccttctgctgggctgttgagtggataccccttccagtgcctgggcttcacccctgaacatcagcgagacttcattgcccgtgacctaggtcctaccctcgccaacagtactcaccacaatgtccgcctactcatgctggatgaccaacgcttgctgctgccccactgggcaaaggtggtactgacagacccagaagcagctaaatatgttcatggcattgctgtacattggtacctggactttctggctccagccaaagccaccctaggggagacacaccgcctgttccccaacaccatgctctttgcctcagaggcctgtgtgggctccaagttctgggagcagagtgtgcggctaggctcctgggatcgagggatgcagtacagccacagcatcatcacgaacctcctgtaccatgtggtcggctggaccgactggaaccttgccctgaaccccgaaggaggacccaattgggtgcgtaactttgtcgacagtcccatcattgtagacatcaccaaggacacgttttacaaacagcccatgttctaccaccttggccacttcagcaagttcattcctgagggctcccagagagtggggctggttgccagtcagaagaacgacctggacgcagtggcactgatgcatcccgatggctctgctgttgtggtcgtgctaaaccgctcctctaaggatgtgcctcttaccatcaaggatcctgctgtgggcttcctggagacaatctcacctggctactccattcacacctacctgtggcgtcgccagtgatggagcagatactcaaggaggcactgggctcagcctgggcattaaagggacagagtcagctcacacgctgtctgtgactaaagagggcacagcagggccagtgtgagcttacagcgacgtaagcccaggggcaatggtttgggtgactcactttcccctctaggtggtgccaggggctggaggcccctagaaaaagatcagtaagccccagtgtccccccagcccccatgcttatgtgaacatgcgctgtgtgctgcttgctttggaaactgggcctgggtccaggcctagggtgagctcactgtccgtacaaacacaagatcagggctgagggtaaggaaaagaagagactaggaaagctgggcccaaaactggagactgtttgtctttcctggagatgcagaactgggcccgtggagcagcagtgtcagcatcagggcggaagccttaaagcagcagcgggtgtgcccaggcacccagatgattcctatggcaccagccaggaaaaatggcagctcttaaaggagaaaatgtttgagccca

SEQ ID NO: 1750 - protein, 524 aa, Homo sapiens
MYALFLLASLLGAALAGPVLGLKECTRGSAVWCQNVKTASDCGAVKHCLQTVWNKPTVKSLPCDICKDVVTAAGDMLKDNATEEEILVYLEKTCDWLPKPNMSASCKEIVDSYLPVILDIIKGEMSRPGEVCSALNLCESLQKHLAELNHQKQLESNKIPELDMTEVVAPFMANIPLLLYPQDGPRSKPQPKDNGDVCQDCIQMVTDIQTAVRTNSTFVQALVEHVKEECDRLGPGMADICKNYISQYSEIAIQMMMHMQPKEICALVGFCDEVKEMPMQTLVPAKVASKNVIPALELVEPIKKHEVPAKSDVYCEVCEFLVKEVTKLIDNNKTEKEILDAFDKMCSKLPKSLSEECQEVVDTYGSSILSILLEEVSPELVCSMLHLCSGTRLPALTVHVTQPKDGGFCEVCKKLVGYLDRNLEKNSTKQEILAALEKGCSFLPDPYQKQCDQFVAEYEPVLIEILVEVMDPSFVCLKIGACPSAHKPLLGTEKCIWGPSYWCQNTETAAQCNAVEHCKRHVWN

SEQ ID NO: 1751 - DNA, 2748 bp, Homo sapiens
gcattgcagactgcggagtcagacggcgctatgtacgccctcttcctcctggccagcctcctgggcgcggctctagccggcccggtccttggactgaaagaatgcaccaggggctcggcagtgtggtgccagaatgtgaagacggcgtccgactgcggggcagtgaagcactgcctgcagaccgtttggaacaagccaacagtgaaatcccttccctgcgacatatgcaaagacgttgtcaccgcagctggtgatatgctgaaggacaatgccactgaggaggagatccttgtttacttggagaagacctgtgactggcttccgaaaccgaacatgtctgcttcatgcaaggagatagtggactcctacctccctgtcatcctggacatcattaaaggagaaatgagccgtcctggggaggtgtgctctgctctcaacctctgcgagtctctccagaagcacctagcagagctgaatcaccagaagcagctggagtccaataagatcccagagctggacatgactgaggtggtggcccccttcatggccaacatccctctcctcctctaccctcaggacggcccccgcagcaagccccagccaaaggataatggggacgtttgccaggactgcattcagatggtgactgacatccagactgctgtacggaccaactccacctttgtccaggccttggtggaacatgtcaaggaggagtgtgaccgcctgggccctggcatggccgacatatgcaagaactatatcagccagtattctgaaattgctatccagatgatgatgcacatgcaacccaaggagatctgtgcgctggttgggttctgtgatgaggtgaaagagatgcccatgcagactctggtccccgccaaagtggcctccaagaatgtcatccctgccctggaactggtggagcccattaagaagcacgaggtcccagcaaagtctgatgtttactgtgaggtgtgtgaattcctggtgaaggaggtgaccaagctgattgacaacaacaagactgagaaagaaatactcgacgcttttgacaaaatgtgctcgaagctgccgaagtccctgtcggaagagtgccaggaggtggtggacacgtacggcagctccatcctgtccatcctgctggaggaggtcagccctgagctggtgtgcagcatgctgcacctctgctctggcacgcggctgcctgcactgaccgttcacgtgactcagccaaaggacggtggcttctgcgaagtgtgcaagaagctggtgggttatttggatcgcaacctggagaaaaacagcaccaagcaggagatcctggctgctcttgagaaaggctgcagcttcctgccagacccttaccagaagcagtgtgatcagtttgtggcagagtacgagcccgtgctgatcgagatcctggtggaggtgatggatccttccttcgtgtgcttgaaaattggagcctgcccctcggcccataagcccttgttgggaactgagaagtgtatatggggcccaagctactggtgccagaacacagagacagcagcccagtgcaatgctgtcgagcattgcaaacgccatgtgtggaactaggaggaggaatattccatcttggcagaaaccacagcattggtttttttctacttgtgtgtctgggggaatgaacgcacagatctgtttgactttgttataaaaatagggctcccccacctcccccatttctgtgtcctttattgtagcattgctgtctgcaagggagcccctagcccctggcagacatagctgcttcagtgccccttttctctctgctagatggatgttgatgcactggaggtcttttagcctgcccttgcatggcgcctgctggaggaggagagagctctgctggcatgagccacagtttcttgactggaggccatcaaccctcttggttgaggccttgttctgagccctgacatgtgcttgggcactggtgggcctgggcttctgaggtggcctcctgccctgatcagggaccctccccgctttcctgggcctctcagttgaacaaagcagcaaaacaaaggcagttttatatgaaagattagaagcctggaataatcaggctttttaaatgatgtaattcccactgtaatagcatagggattttggaagcagctgctggtggcttgggacatcagtggggccaagggttctctgtccctggttcaactgtgatttggctttcccgtgtctttcctggtgatgccttgtttggggttctgtgggtttgggtgggaagagggccatctgcctgaatgtaacctgctagctctccgaaggccctgcgggcctggcttgtgtgagcgtgtggacagtggtggccgcgctgtgcctgctcgtgttgcctacatgtccctggctgttgaggcgctgcttcagcctgcacccctcccttgtctcatagatgctccttttgaccttttcaaataaatatggatggcgagctcctaggcctctggcttcctggtagagggcggcatgccgaagggtctgctgggtgtggattggatgctggggtgtgggggttggaagctgtctgtggcccacttgggcacccacgcttctgtccacttctggttgccaggagacagcaagcaaagccagcaggacatgaagttgctattaaatggacttcgtgatttttgttttgcactaaagtttctgtgatttaacaataaaattctgttagccaga

SEQ ID NO: 1752 - protein, 527 aa, Homo sapiens
MYALFLLASLLGAALAGPVLGLKECTRGSAVWCQNVKTASDCGAVKHCLQTVWNKPTVKSLPCDICKDVVTAAGDMLKDNATEEEILVYLEKTCDWLPKPNMSASCKEIVDSYLPVILDIIKGEMSRPGEVCSALNLCESLQKHLAELNHQKQLESNKIPELDMTEVVAPFMANIPLLLYPQDGPRSKPQPKDNGDVCQDCIQMVTDIQTAVRTNSTFVQALVEHVKEECDRLGPGMADICKNYISQYSEIAIQMMMHMQDQQPKEICALVGFCDEVKEMPMQTLVPAKVASKNVIPALELVEPIKKHEVPAKSDVYCEVCEFLVKEVTKLIDNNKTEKEILDAFDKMCSKLPKSLSEECQEVVDTYGSSILSILLEEVSPELVCSMLHLCSGTRLPALTVHVTQPKDGGFCEVCKKLVGYLDRNLEKNSTKQEILAALEKGCSFLPDPYQKQCDQFVAEYEPVLIEILVEVMDPSFVCLKIGACPSAHKPLLGTEKCIWGPSYWCQNTETAAQCNAVEHCKRHVWN

SEQ ID NO: 1753 - DNA, 2757 bp, Homo sapiens
gcattgcagactgcggagtcagacggcgctatgtacgccctcttcctcctggccagcctcctgggcgcggctctagccggcccggtccttggactgaaagaatgcaccaggggctcggcagtgtggtgccagaatgtgaagacggcgtccgactgcggggcagtgaagcactgcctgcagaccgtttggaacaagccaacagtgaaatcccttccctgcgacatatgcaaagacgttgtcaccgcagctggtgatatgctgaaggacaatgccactgaggaggagatccttgtttacttggagaagacctgtgactggcttccgaaaccgaacatgtctgcttcatgcaaggagatagtggactcctacctccctgtcatcctggacatcattaaaggagaaatgagccgtcctggggaggtgtgctctgctctcaacctctgcgagtctctccagaagcacctagcagagctgaatcaccagaagcagctggagtccaataagatcccagagctggacatgactgaggtggtggcccccttcatggccaacatccctctcctcctctaccctcaggacggcccccgcagcaagccccagccaaaggataatggggacgtttgccaggactgcattcagatggtgactgacatccagactgctgtacggaccaactccacctttgtccaggccttggtggaacatgtcaaggaggagtgtgaccgcctgggccctggcatggccgacatatgcaagaactatatcagccagtattctgaaattgctatccagatgatgatgcacatgcaggatcagcaacccaaggagatctgtgcgctggttgggttctgtgatgaggtgaaagagatgcccatgcagactctggtccccgccaaagtggcctccaagaatgtcatccctgccctggaactggtggagcccattaagaagcacgaggtcccagcaaagtctgatgtttactgtgaggtgtgtgaattcctggtgaaggaggtgaccaagctgattgacaacaacaagactgagaaagaaatactcgacgcttttgacaaaatgtgctcgaagctgccgaagtccctgtcggaagagtgccaggaggtggtggacacgtacggcagctccatcctgtccatcctgctggaggaggtcagccctgagctggtgtgcagcatgctgcacctctgctctggcacgcggctgcctgcactgaccgttcacgtgactcagccaaaggacggtggcttctgcgaagtgtgcaagaagctggtgggttatttggatcgcaacctggagaaaaacagcaccaagcaggagatcctggctgctcttgagaaaggctgcagcttcctgccagacccttaccagaagcagtgtgatcagtttgtggcagagtacgagcccgtgctgatcgagatcctggtggaggtgatggatccttccttcgtgtgcttgaaaattggagcctgcccctcggcccataagcccttgttgggaactgagaagtgtatatggggcccaagctactggtgccagaacacagagacagcagcccagtgcaatgctgtcgagcattgcaaacgccatgtgtggaactaggaggaggaatattccatcttggcagaaaccacagcattggtttttttctacttgtgtgtctgggggaatgaacgcacagatctgtttgactttgttataaaaatagggctcccccacctcccccatttctgtgtcctttattgtagcattgctgtctgcaagggagcccctagcccctggcagacatagctgcttcagtgccccttttctctctgctagatggatgttgatgcactggaggtcttttagcctgcccttgcatggcgcctgctggaggaggagagagctctgctggcatgagccacagtttcttgactggaggccatcaaccctcttggttgaggccttgttctgagccctgacatgtgcttgggcactggtgggcctgggcttctgaggtggcctcctgccctgatcagggaccctccccgctttcctgggcctctcagttgaacaaagcagcaaaacaaaggcagttttatatgaaagattagaagcctggaataatcaggctttttaaatgatgtaattcccactgtaatagcatagggattttggaagcagctgctggtggcttgggacatcagtggggccaagggttctctgtccctggttcaactgtgatttggctttcccgtgtctttcctggtgatgccttgtttggggttctgtgggtttgggtgggaagagggccatctgcctgaatgtaacctgctagctctccgaaggccctgcgggcctggcttgtgtgagcgtgtggacagtggtggccgcgctgtgcctgctcgtgttgcctacatgtccctggctgttgaggcgctgcttcagcctgcacccctcccttgtctcatagatgctccttttgaccttttcaaataaatatggatggcgagctcctaggcctctggcttcctggtagagggcggcatgccgaagggtctgctgggtgtggattggatgctggggtgtgggggttggaagctgtctgtggcccacttgggcacccacgcttctgtccacttctggttgccaggagacagcaagcaaagccagcaggacatgaagttgctattaaatggacttcgtgatttttgttttgcactaaagtttctgtgatttaacaataaaattctgttagccaga

SEQ ID NO: 1754 - protein, 526 aa, Homo sapiens
MYALFLLASLLGAALAGPVLGLKECTRGSAVWCQNVKTASDCGAVKHCLQTVWNKPTVKSLPCDICKDVVTAAGDMLKDNATEEEILVYLEKTCDWLPKPNMSASCKEIVDSYLPVILDIIKGEMSRPGEVCSALNLCESLQKHLAELNHQKQLESNKIPELDMTEVVAPFMANIPLLLYPQDGPRSKPQPKDNGDVCQDCIQMVTDIQTAVRTNSTFVQALVEHVKEECDRLGPGMADICKNYISQYSEIAIQMMMHMDQQPKEICALVGFCDEVKEMPMQTLVPAKVASKNVIPALELVEPIKKHEVPAKSDVYCEVCEFLVKEVTKLIDNNKTEKEILDAFDKMCSKLPKSLSEECQEVVDTYGSSILSILLEEVSPELVCSMLHLCSGTRLPALTVHVTQPKDGGFCEVCKKLVGYLDRNLEKNSTKQEILAALEKGCSFLPDPYQKQCDQFVAEYEPVLIEILVEVMDPSFVCLKIGACPSAHKPLLGTEKCIWGPSYWCQNTETAAQCNAVEHCKRHVWN

SEQ ID NO: 1755 - DNA, 2754 bp, Homo sapiens
gcattgcagactgcggagtcagacggcgctatgtacgccctcttcctcctggccagcctcctgggcgcggctctagccggcccggtccttggactgaaagaatgcaccaggggctcggcagtgtggtgccagaatgtgaagacggcgtccgactgcggggcagtgaagcactgcctgcagaccgtttggaacaagccaacagtgaaatcccttccctgcgacatatgcaaagacgttgtcaccgcagctggtgatatgctgaaggacaatgccactgaggaggagatccttgtttacttggagaagacctgtgactggcttccgaaaccgaacatgtctgcttcatgcaaggagatagtggactcctacctccctgtcatcctggacatcattaaaggagaaatgagccgtcctggggaggtgtgctctgctctcaacctctgcgagtctctccagaagcacctagcagagctgaatcaccagaagcagctggagtccaataagatcccagagctggacatgactgaggtggtggcccccttcatggccaacatccctctcctcctctaccctcaggacggcccccgcagcaagccccagccaaaggataatggggacgtttgccaggactgcattcagatggtgactgacatccagactgctgtacggaccaactccacctttgtccaggccttggtggaacatgtcaaggaggagtgtgaccgcctgggccctggcatggccgacatatgcaagaactatatcagccagtattctgaaattgctatccagatgatgatgcacatggatcagcaacccaaggagatctgtgcgctggttgggttctgtgatgaggtgaaagagatgcccatgcagactctggtccccgccaaagtggcctccaagaatgtcatccctgccctggaactggtggagcccattaagaagcacgaggtcccagcaaagtctgatgtttactgtgaggtgtgtgaattcctggtgaaggaggtgaccaagctgattgacaacaacaagactgagaaagaaatactcgacgcttttgacaaaatgtgctcgaagctgccgaagtccctgtcggaagagtgccaggaggtggtggacacgtacggcagctccatcctgtccatcctgctggaggaggtcagccctgagctggtgtgcagcatgctgcacctctgctctggcacgcggctgcctgcactgaccgttcacgtgactcagccaaaggacggtggcttctgcgaagtgtgcaagaagctggtgggttatttggatcgcaacctggagaaaaacagcaccaagcaggagatcctggctgctcttgagaaaggctgcagcttcctgccagacccttaccagaagcagtgtgatcagtttgtggcagagtacgagcccgtgctgatcgagatcctggtggaggtgatggatccttccttcgtgtgcttgaaaattggagcctgcccctcggcccataagcccttgttgggaactgagaagtgtatatggggcccaagctactggtgccagaacacagagacagcagcccagtgcaatgctgtcgagcattgcaaacgccatgtgtggaactaggaggaggaatattccatcttggcagaaaccacagcattggtttttttctacttgtgtgtctgggggaatgaacgcacagatctgtttgactttgttataaaaatagggctcccccacctcccccatttctgtgtcctttattgtagcattgctgtctgcaagggagcccctagcccctggcagacatagctgcttcagtgccccttttctctctgctagatggatgttgatgcactggaggtcttttagcctgcccttgcatggcgcctgctggaggaggagagagctctgctggcatgagccacagtttcttgactggaggccatcaaccctcttggttgaggccttgttctgagccctgacatgtgcttgggcactggtgggcctgggcttctgaggtggcctcctgccctgatcagggaccctccccgctttcctgggcctctcagttgaacaaagcagcaaaacaaaggcagttttatatgaaagattagaagcctggaataatcaggctttttaaatgatgtaattcccactgtaatagcatagggattttggaagcagctgctggtggcttgggacatcagtggggccaagggttctctgtccctggttcaactgtgatttggctttcccgtgtctttcctggtgatgccttgtttggggttctgtgggtttgggtgggaagagggccatctgcctgaatgtaacctgctagctctccgaaggccctgcgggcctggcttgtgtgagcgtgtggacagtggtggccgcgctgtgcctgctcgtgttgcctacatgtccctggctgttgaggcgctgcttcagcctgcacccctcccttgtctcatagatgctccttttgaccttttcaaataaatatggatggcgagctcctaggcctctggcttcctggtagagggcggcatgccgaagggtctgctgggtgtggattggatgctggggtgtgggggttggaagctgtctgtggcccacttgggcacccacgcttctgtccacttctggttgccaggagacagcaagcaaagccagcaggacatgaagttgctattaaatggacttcgtgatttttgttttgcactaaagtttctgtgatttaacaataaaattctgttagccaga

SEQ ID NO: 1756 - protein, 81 aa, Homo sapiens
SLPCDICKDVVTAAGDMLKDNATEEEILVYLEKTCDWLPKPNMSASCKEIVDSYLPVILDIIKGEMSRPGEVCSALNLCES

SEQ ID NO: 1757 - protein, 81 aa, Homo sapiens
GDVCQDCIQMVTDIQTAVRTNSTFVQALVEHVKEECDRLGPGMADICKNYISQYSEIAIQMMMHMQPKEICALVGFCDEVK

SEQ ID NO: 1758 - protein, 80 aa, Homo sapiens
SDVYCEVCEFLVKEVTKLIDNNKTEKEILDAFDKMCSKLPKSLSEECQEVVDTYGSSILSILLEEVSPELVCSMLHLCSG

SEQ ID NO: 1759 - DNA, 3413 bp, Artificial Sequence
  source: /note="Description of Artificial Sequence: Synthetic polynucleotide"
ctgcgcgctcgctcgctcactgaggccgcccgggcaaagcccgggcgtcgggcgacctttggtcgcccggcctcagtgagcgagcgagcgcgcagagagggagtggccaactccatcactaggggttccttgtagttaatgattaacccgccatgctacttatctaccagggtaatggggatcctctagaactatagctagtcgacattgattattgactagttattaatagtaatcaattacggggtcattagttcatagcccatatatggagttccgcgttacataacttacggtaaatggcccgcctggctgaccgcccaacgacccccgcccattgacgtcaataatgacgtatgttcccatagtaacgccaatagggactttccattgacgtcaatgggtggagtatttacggtaaactgcccacttggcagtacatcaagtgtatcatatgccaagtacgccccctattgacgtcaatgacggtaaatggcccgcctggcattatgcccagtacatgaccttatgggactttcctacttggcagtacatctacgtattagtcatcgctattaccatgtcgaggccacgttctgcttcactctccccatctcccccccctccccacccccaattttgtatttatttattttttaattattttgtgcagcgatgggggcggggggggggggcgcgcgccaggcggggcggggcggggcgaggggcggggcggggcgaggcggagaggtgcggcggcagccaatcagagcggcgcgctccgaaagtttccttttatggcgaggcggcggcggcggcggccctataaaaagcgaagcgcgcggcgggcgggagcaagcttcgtttagtgaaccgtcagatcgcctggagacgccatccacgctgttttgacctccatagaagacaccgggaccgatccagcctccgcggattcgaatcccggccgggaacggtgcattggaacgcggattccccgtgccaagagtgacgtaagtaccgcctatagagtctataggcccacaaaaaatgctttcttcttttaatatacttttttgtttatcttatttctaatactttccctaatctctttctttcagggcaataatgatacaatgtatcatgcctctttgcaccattctaaagaataacagtgataatttctgggttaaggcaatagcaatatttctgcatataaatatttctgcatataaattgtaactgatgtaagaggtttcatattgctaatagcagctacaatccagctaccattctgcttttattttatggttgggataaggctggattattctgagtccaagctaggcccttttgctaatcatgttcatacctcttatcttcctcccacagctcctgggcaacgtgctggtctgtgtgctggcccatcactttggcaaagaattgggattcgaaccggtgccgccaccatggaattcagcagccccagcagagaggaatgccccaagcctctgagccgggtgtcaatcatggccggatctctgacaggactgctgctgcttcaggccgtgtcttgggcttctggcgctagaccttgcatccccaagagcttcggctacagcagcgtcgtgtgcgtgtgcaatgccacctactgcgacagcttcgaccctcctacctttcctgctctgggcaccttcagcagatacgagagcaccagatccggcagacggatggaactgagcatgggacccatccaggccaatcacacaggcactggcctgctgctgacactgcagcctgagcagaaattccagaaagtgaaaggcttcggcggagccatgacagatgccgccgctctgaatatcctggctctgtctccaccagctcagaacctgctgctcaagagctacttcagcgaggaaggcatcggctacaacatcatcagagtgcccatggccagctgcgacttcagcatcaggacctacacctacgccgacacacccgacgatttccagctgcacaacttcagcctgcctgaagaggacaccaagctgaagatccctctgatccacagagccctgcagctggcacaaagacccgtgtcactgctggcctctccatggacatctcccacctggctgaaaacaaatggcgccgtgaatggcaagggcagcctgaaaggccaacctggcgacatctaccaccagacctgggccagatacttcgtgaagttcctggacgcctatgccgagcacaagctgcagttttgggccgtgacagccgagaacgaaccttctgctggactgctgagcggctacccctttcagtgcctgggctttacacccgagcaccagcgggactttatcgcccgtgatctgggacccacactggccaatagcacccaccataatgtgcggctgctgatgctggacgaccagagactgcttctgccccactgggctaaagtggtgctgacagatcctgaggccgccaaatacgtgcacggaatcgccgtgcactggtatctggactttctggcccctgccaaggccacactgggagagacacacagactgttccccaacaccatgctgttcgccagcgaagcctgtgtgggcagcaagttttgggaacagagcgtgcggctcggcagctgggatagaggcatgcagtacagccacagcatcatcaccaacctgctgtaccacgtcgtcggctggaccgactggaatctggccctgaatcctgaaggcggccctaactgggtccgaaacttcgtggacagccccatcatcgtggacatcaccaaggacaccttctacaagcagcccatgttctaccacctgggacacttcagcaagttcatccccgagggctctcagcgcgttggactggtggcttcccagaagaacgatctggacgccgtggctctgatgcaccctgatggatctgctgtggtggtggtcctgaaccgcagcagcaaagatgtgcccctgaccatcaaggatcccgccgtgggattcctggaaacaatcagccctggctactccatccacacctacctgtggcgtagacagtagtaactcgaggacggggtgaactacgcctgaggatccgatctttttccctctgccaaaaattatggggacatcatgaagccccttgagcatctgacttctggctaataaaggaaatttattttcattgcaatagtgtgttggaattttttgtgtctctcactcggcctaggtagataagtagcatggcgggttaatcattaactacaaggaacccctagtgatggagttggccactccctctctgcgcgctcgctcgctcactgaggccgggcgaccaaaggtcgcccgacgcccgggctttgcccgggcggcctcagtgagcgagcgagcgcgcag

SEQ ID NO: 1760 - DNA, 3428 bp, Artificial Sequence
  source: /note="Description of Artificial Sequence: Synthetic polynucleotide"
ctgcgcgctcgctcgctcactgaggccgcccgggcaaagcccgggcgtcgggcgacctttggtcgcccggcctcagtgagcgagcgagcgcgcagagagggagtggccaactccatcactaggggttccttgtagttaatgattaacccgccatgctacttatctaccagggtaatggggatcctctagaactatagctagtcgacattgattattgactagttattaatagtaatcaattacggggtcattagttcatagcccatatatggagttccgcgttacataacttacggtaaatggcccgcctggctgaccgcccaacgacccccgcccattgacgtcaataatgacgtatgttcccatagtaacgccaatagggactttccattgacgtcaatgggtggagtatttacggtaaactgcccacttggcagtacatcaagtgtatcatatgccaagtacgccccctattgacgtcaatgacggtaaatggcccgcctggcattatgcccagtacatgaccttatgggactttcctacttggcagtacatctacgtattagtcatcgctattaccatgtcgaggccacgttctgcttcactctccccatctcccccccctccccacccccaattttgtatttatttattttttaattattttgtgcagcgatgggggcggggggggggggcgcgcgccaggcggggcggggcggggcgaggggcggggcggggcgaggcggagaggtgcggcggcagccaatcagagcggcgcgctccgaaagtttccttttatggcgaggcggcggcggcggcggccctataaaaagcgaagcgcgcggcgggcgggagcaagcttcgtttagtgaaccgtcagatcgcctggagacgccatccacgctgttttgacctccatagaagacaccgggaccgatccagcctccgcggattcgaatcccggccgggaacggtgcattggaacgcggattccccgtgccaagagtgacgtaagtaccgcctatagagtctataggcccacaaaaaatgctttcttcttttaatatacttttttgtttatcttatttctaatactttccctaatctctttctttcagggcaataatgatacaatgtatcatgcctctttgcaccattctaaagaataacagtgataatttctgggttaaggcaatagcaatatttctgcatataaatatttctgcatataaattgtaactgatgtaagaggtttcatattgctaatagcagctacaatccagctaccattctgcttttattttatggttgggataaggctggattattctgagtccaagctaggcccttttgctaatcatgttcatacctcttatcttcctcccacagctcctgggcaacgtgctggtctgtgtgctggcccatcactttggcaaagaattgggattcgaaccggtgccgccaccatggaattcagcagccccagcagagaggaatgccccaagcctctgagccgggtgtcaatcatggccggatctctgacaggactgctgctgcttcaggccgtgtcttgggcttctggcgctagaccttgcatccccaagagcttcggctacagcagcgtcgtgtgcgtgtgcaatgccacctactgcgacagcttcgaccctcctacctttcctgctctgggcaccttcagcagatacgagagcaccagatccggcagacggatggaactgagcatgggacccatccaggccaatcacacaggcactggcctgctgctgacactgcagcctgagcagaaattccagaaagtgaaaggcttcggcggagccatgacagatgccgccgctctgaatatcctggctctgtctccaccagctcagaacctgctgctcaagagctacttcagcgaggaaggcatcggctacaacatcatcagagtgcccatggccagctgcgacttcagcatcaggacctacacctacgccgacacacccgacgatttccagctgcacaacttcagcctgcctgaagaggacaccaagctgaagatccctctgatccacagagccctgcagctggcacaaagacccgtgtcactgctggcctctccatggacatctcccacctggctgaaaacaaatggcgccgtgaatggcaagggcagcctgaaaggccaacctggcgacatctaccaccagacctgggccagatacttcgtgaagttcctggacgcctatgccgagcacaagctgcagttttgggccgtgacagccgagaacgaaccttctgctggactgctgagcggctacccctttcagtgcctgggctttacacccgagcaccagcgggactttatcgcccgtgatctgggacccacactggccaatagcacccaccataatgtgcggctgctgatgctggacgaccagagactgcttctgccccactgggctaaagtggtgctgacagatcctgaggccgccaaatacgtgcacggaatcgccgtgcactggtatctggactttctggcccctgccaaggccacactgggagagacacacagactgttccccaacaccatgctgttcgccagcgaagcctgtgtgggcagcaagttttgggaacagagcgtgcggctcggcagctgggatagaggcatgcagtacagccacagcatcatcaccaacctgctgtaccacgtcgtcggctggaccgactggaatctggccctgaatcctgaaggcggccctaactgggtccgaaacttcgtggacagccccatcatcgtggacatcaccaaggacaccttctacaagcagcccatgttctaccacctgggacacttcagcaagttcatccccgagggctctcagcgcgttggactggtggcttcccagaagaacgatctggacgccgtggctctgatgcaccctgatggatctgctgtggtggtggtcctgaaccgcagcagcaaagatgtgcccctgaccatcaaggatcccgccgtgggattcctggaaacaatcagccctggctactccatccacacctacctgtggcgtagacagaagtttgaaagacagtagtaactcgaggacggggtgaactacgcctgaggatccgatctttttccctctgccaaaaattatggggacatcatgaagccccttgagcatctgacttctggctaataaaggaaatttattttcattgcaatagtgtgttggaattttttgtgtctctcactcggcctaggtagataagtagcatggcgggttaatcattaactacaaggaacccctagtgatggagttggccactccctctctgcgcgctcgctcgctcactgaggccgggcgaccaaaggtcgcccgacgcccgggctttgcccgggcggcctcagtgagcgagcgagcgcgcag

SEQ ID NO: 1761 - DNA, 3476 bp, Artificial Sequence
  source: /note="Description of Artificial Sequence: Synthetic polynucleotide"
ctgcgcgctcgctcgctcactgaggccgcccgggcaaagcccgggcgtcgggcgacctttggtcgcccggcctcagtgagcgagcgagcgcgcagagagggagtggccaactccatcactaggggttccttgtagttaatgattaacccgccatgctacttatctaccagggtaatggggatcctctagaactatagctagtcgacattgattattgactagttattaatagtaatcaattacggggtcattagttcatagcccatatatggagttccgcgttacataacttacggtaaatggcccgcctggctgaccgcccaacgacccccgcccattgacgtcaataatgacgtatgttcccatagtaacgccaatagggactttccattgacgtcaatgggtggagtatttacggtaaactgcccacttggcagtacatcaagtgtatcatatgccaagtacgccccctattgacgtcaatgacggtaaatggcccgcctggcattatgcccagtacatgaccttatgggactttcctacttggcagtacatctacgtattagtcatcgctattaccatgtcgaggccacgttctgcttcactctccccatctcccccccctccccacccccaattttgtatttatttattttttaattattttgtgcagcgatgggggcggggggggggggcgcgcgccaggcggggcggggcggggcgaggggcggggcggggcgaggcggagaggtgcggcggcagccaatcagagcggcgcgctccgaaagtttccttttatggcgaggcggcggcggcggcggccctataaaaagcgaagcgcgcggcgggcgggagcaagcttcgtttagtgaaccgtcagatcgcctggagacgccatccacgctgttttgacctccatagaagacaccgggaccgatccagcctccgcggattcgaatcccggccgggaacggtgcattggaacgcggattccccgtgccaagagtgacgtaagtaccgcctatagagtctataggcccacaaaaaatgctttcttcttttaatatacttttttgtttatcttatttctaatactttccctaatctctttctttcagggcaataatgatacaatgtatcatgcctctttgcaccattctaaagaataacagtgataatttctgggttaaggcaatagcaatatttctgcatataaatatttctgcatataaattgtaactgatgtaagaggtttcatattgctaatagcagctacaatccagctaccattctgcttttattttatggttgggataaggctggattattctgagtccaagctaggcccttttgctaatcatgttcatacctcttatcttcctcccacagctcctgggcaacgtgctggtctgtgtgctggcccatcactttggcaaagaattgggattcgaaccggtgccgccaccatggaattcagcagccccagcagagaggaatgccccaagcctctgagccgggtgtcaatcatggccggatctctgacaggactgctgctgcttcaggccgtgtcttgggcttctggcatgaaggagaccgctgctgcaaagttcgagagacagcatatggatagctccacaagcgccgcagctagaccttgcatccccaagagcttcggctacagcagcgtcgtgtgcgtgtgcaatgccacctactgcgacagcttcgaccctcctacctttcctgctctgggcaccttcagcagatacgagagcaccagatccggcagacggatggaactgagcatgggacccatccaggccaatcacacaggcactggcctgctgctgacactgcagcctgagcagaaattccagaaagtgaaaggcttcggcggagccatgacagatgccgccgctctgaatatcctggctctgtctccaccagctcagaacctgctgctcaagagctacttcagcgaggaaggcatcggctacaacatcatcagagtgcccatggccagctgcgacttcagcatcaggacctacacctacgccgacacacccgacgatttccagctgcacaacttcagcctgcctgaagaggacaccaagctgaagatccctctgatccacagagccctgcagctggcacaaagacccgtgtcactgctggcctctccatggacatctcccacctggctgaaaacaaatggcgccgtgaatggcaagggcagcctgaaaggccaacctggcgacatctaccaccagacctgggccagatacttcgtgaagttcctggacgcctatgccgagcacaagctgcagttttgggccgtgacagccgagaacgaaccttctgctggactgctgagcggctacccctttcagtgcctgggctttacacccgagcaccagcgggactttatcgcccgtgatctgggacccacactggccaatagcacccaccataatgtgcggctgctgatgctggacgaccagagactgcttctgccccactgggctaaagtggtgctgacagatcctgaggccgccaaatacgtgcacggaatcgccgtgcactggtatctggactttctggcccctgccaaggccacactgggagagacacacagactgttccccaacaccatgctgttcgccagcgaagcctgtgtgggcagcaagttttgggaacagagcgtgcggctcggcagctgggatagaggcatgcagtacagccacagcatcatcaccaacctgctgtaccacgtcgtcggctggaccgactggaatctggccctgaatcctgaaggcggccctaactgggtccgaaacttcgtggacagccccatcatcgtggacatcaccaaggacaccttctacaagcagcccatgttctaccacctgggacacttcagcaagttcatccccgagggctctcagcgcgttggactggtggcttcccagaagaacgatctggacgccgtggctctgatgcaccctgatggatctgctgtggtggtggtcctgaaccgcagcagcaaagatgtgcccctgaccatcaaggatcccgccgtgggattcctggaaacaatcagccctggctactccatccacacctacctgtggcgtagacagtagtaactcgaggacggggtgaactacgcctgaggatccgatctttttccctctgccaaaaattatggggacatcatgaagccccttgagcatctgacttctggctaataaaggaaatttattttcattgcaatagtgtgttggaattttttgtgtctctcactcggcctaggtagataagtagcatggcgggttaatcattaactacaaggaacccctagtgatggagttggccactccctctctgcgcgctcgctcgctcactgaggccgggcgaccaaaggtcgcccgacgcccgggctttgcccgggcggcctcagtgagcgagcgagcgcgcag

SEQ ID NO: 1762 - DNA, 3428 bp, Artificial Sequence
  source: /note="Description of Artificial Sequence: Synthetic polynucleotide"
ctgcgcgctcgctcgctcactgaggccgcccgggcaaagcccgggcgtcgggcgacctttggtcgcccggcctcagtgagcgagcgagcgcgcagagagggagtggccaactccatcactaggggttccttgtagttaatgattaacccgccatgctacttatctaccagggtaatggggatcctctagaactatagctagtcgacattgattattgactagttattaatagtaatcaattacggggtcattagttcatagcccatatatggagttccgcgttacataacttacggtaaatggcccgcctggctgaccgcccaacgacccccgcccattgacgtcaataatgacgtatgttcccatagtaacgccaatagggactttccattgacgtcaatgggtggagtatttacggtaaactgcccacttggcagtacatcaagtgtatcatatgccaagtacgccccctattgacgtcaatgacggtaaatggcccgcctggcattatgcccagtacatgaccttatgggactttcctacttggcagtacatctacgtattagtcatcgctattaccatgtcgaggccacgttctgcttcactctccccatctcccccccctccccacccccaattttgtatttatttattttttaattattttgtgcagcgatgggggcggggggggggggcgcgcgccaggcggggcggggcggggcgaggggcggggcggggcgaggcggagaggtgcggcggcagccaatcagagcggcgcgctccgaaagtttccttttatggcgaggcggcggcggcggcggccctataaaaagcgaagcgcgcggcgggcgggagcaagcttcgtttagtgaaccgtcagatcgcctggagacgccatccacgctgttttgacctccatagaagacaccgggaccgatccagcctccgcggattcgaatcccggccgggaacggtgcattggaacgcggattccccgtgccaagagtgacgtaagtaccgcctatagagtctataggcccacaaaaaatgctttcttcttttaatatacttttttgtttatcttatttctaatactttccctaatctctttctttcagggcaataatgatacaatgtatcatgcctctttgcaccattctaaagaataacagtgataatttctgggttaaggcaatagcaatatttctgcatataaatatttctgcatataaattgtaactgatgtaagaggtttcatattgctaatagcagctacaatccagctaccattctgcttttattttatggttgggataaggctggattattctgagtccaagctaggcccttttgctaatcatgttcatacctcttatcttcctcccacagctcctgggcaacgtgctggtctgtgtgctggcccatcactttggcaaagaattgggattcgaaccggtgccgccaccatggaattcagcagccccagcagagaggaatgccccaagcctctgagccgggtgtcaatcatggccggatctctgacaggactgctgctgcttcaggccgtgtcttgggcttctggcgctagaccttgcatccccaagagcttcggctacagcagcgtcgtgtgcgtgtgcaatgccacctactgcgacagcttcgaccctcctacctttcctgctctgggcaccttcagcagatacgagagcaccagatccggcagacggatggaactgagcatgggacccatccaggccaatcacacaggcactggcctgctgctgacactgcagcctgagcagaaattccagaaagtgaaaggcttcggcggagccatgacagatgccgccgctctgaatatcctggctctgtctccaccagctcagaacctgctgctcaagagctacttcagcgaggaaggcatcggctacaacatcatcagagtgcccatggccagctgcgacttcagcatcaggacctacacctacgccgacacacccgacgatttccagctgcacaacttcagcctgcctgaagaggacaccaagctgaagatccctctgatccacagagccctgcagctggcacaaagacccgtgtcactgctggcctctccatggacatctcccacctggctgaaaacaaatggcgccgtgaatggcaagggcagcctgaaaggccaacctggcgacatctaccaccagacctgggccagatacttcgtgaagttcctggacgcctatgccgagcacaagctgcagttttgggccgtgacagccgagaacgaaccttctgctggactgctgagcggctacccctttcagtgcctgggctttacacccgagcaccagcgggactttatcgcccgtgatctgggacccacactggccaatagcacccaccataatgtgcggctgctgatgctggacgaccagagactgcttctgccccactgggctaaagtggtgctgacagatcctgaggccgccaaatacgtgcacggaatcgccgtgcactggtatctggactttctggcccctgccaaggccacactgggagagacacacagactgttccccaacaccatgctgttcgccagcgaagcctgtgtgggcagcaagttttgggaacagagcgtgcggctcggcagctgggatagaggcatgcagtacagccacagcatcatcaccaacctgctgtaccacgtcgtcggctggaccgactggaatctggccctgaatcctgaaggcggccctaactgggtccgaaacttcgtggacagccccatcatcgtggacatcaccaaggacaccttctacaagcagcccatgttctaccacctgggacacttcagcaagttcatccccgagggctctcagcgcgttggactggtggcttcccagaagaacgatctggacgccgtggctctgatgcaccctgatggatctgctgtggtggtggtcctgaaccgcagcagcaaagatgtgcccctgaccatcaaggatcccgccgtgggattcctggaaacaatcagccctggctactccatccacacctacctgtggcgtagacagcagaaaatcctggattagtaactcgaggacggggtgaactacgcctgaggatccgatctttttccctctgccaaaaattatggggacatcatgaagccccttgagcatctgacttctggctaataaaggaaatttattttcattgcaatagtgtgttggaattttttgtgtctctcactcggcctaggtagataagtagcatggcgggttaatcattaactacaaggaacccctagtgatggagttggccactccctctctgcgcgctcgctcgctcactgaggccgggcgaccaaaggtcgcccgacgcccgggctttgcccgggcggcctcagtgagcgagcgagcgcgcag

SEQ ID NO: 1763 - DNA, 3428 bp, Artificial Sequence
  source: /note="Description of Artificial Sequence: Synthetic polynucleotide"
ctgcgcgctcgctcgctcactgaggccgcccgggcaaagcccgggcgtcgggcgacctttggtcgcccggcctcagtgagcgagcgagcgcgcagagagggagtggccaactccatcactaggggttccttgtagttaatgattaacccgccatgctacttatctaccagggtaatggggatcctctagaactatagctagtcgacattgattattgactagttattaatagtaatcaattacggggtcattagttcatagcccatatatggagttccgcgttacataacttacggtaaatggcccgcctggctgaccgcccaacgacccccgcccattgacgtcaataatgacgtatgttcccatagtaacgccaatagggactttccattgacgtcaatgggtggagtatttacggtaaactgcccacttggcagtacatcaagtgtatcatatgccaagtacgccccctattgacgtcaatgacggtaaatggcccgcctggcattatgcccagtacatgaccttatgggactttcctacttggcagtacatctacgtattagtcatcgctattaccatgtcgaggccacgttctgcttcactctccccatctcccccccctccccacccccaattttgtatttatttattttttaattattttgtgcagcgatgggggcggggggggggggcgcgcgccaggcggggcggggcggggcgaggggcggggcggggcgaggcggagaggtgcggcggcagccaatcagagcggcgcgctccgaaagtttccttttatggcgaggcggcggcggcggcggccctataaaaagcgaagcgcgcggcgggcgggagcaagcttcgtttagtgaaccgtcagatcgcctggagacgccatccacgctgttttgacctccatagaagacaccgggaccgatccagcctccgcggattcgaatcccggccgggaacggtgcattggaacgcggattccccgtgccaagagtgacgtaagtaccgcctatagagtctataggcccacaaaaaatgctttcttcttttaatatacttttttgtttatcttatttctaatactttccctaatctctttctttcagggcaataatgatacaatgtatcatgcctctttgcaccattctaaagaataacagtgataatttctgggttaaggcaatagcaatatttctgcatataaatatttctgcatataaattgtaactgatgtaagaggtttcatattgctaatagcagctacaatccagctaccattctgcttttattttatggttgggataaggctggattattctgagtccaagctaggcccttttgctaatcatgttcatacctcttatcttcctcccacagctcctgggcaacgtgctggtctgtgtgctggcccatcactttggcaaagaattgggattcgaaccggtgccgccaccatggaattcagcagccccagcagagaggaatgccccaagcctctgagccgggtgtcaatcatggccggatctctgacaggactgctgctgcttcaggccgtgtcttgggcttctggcgctagaccttgcatccccaagagcttcggctacagcagcgtcgtgtgcgtgtgcaatgccacctactgcgacagcttcgaccctcctacctttcctgctctgggcaccttcagcagatacgagagcaccagatccggcagacggatggaactgagcatgggacccatccaggccaatcacacaggcactggcctgctgctgacactgcagcctgagcagaaattccagaaagtgaaaggcttcggcggagccatgacagatgccgccgctctgaatatcctggctctgtctccaccagctcagaacctgctgctcaagagctacttcagcgaggaaggcatcggctacaacatcatcagagtgcccatggccagctgcgacttcagcatcaggacctacacctacgccgacacacccgacgatttccagctgcacaacttcagcctgcctgaagaggacaccaagctgaagatccctctgatccacagagccctgcagctggcacaaagacccgtgtcactgctggcctctccatggacatctcccacctggctgaaaacaaatggcgccgtgaatggcaagggcagcctgaaaggccaacctggcgacatctaccaccagacctgggccagatacttcgtgaagttcctggacgcctatgccgagcacaagctgcagttttgggccgtgacagccgagaacgaaccttctgctggactgctgagcggctacccctttcagtgcctgggctttacacccgagcaccagcgggactttatcgcccgtgatctgggacccacactggccaatagcacccaccataatgtgcggctgctgatgctggacgaccagagactgcttctgccccactgggctaaagtggtgctgacagatcctgaggccgccaaatacgtgcacggaatcgccgtgcactggtatctggactttctggcccctgccaaggccacactgggagagacacacagactgttccccaacaccatgctgttcgccagcgaagcctgtgtgggcagcaagttttgggaacagagcgtgcggctcggcagctgggatagaggcatgcagtacagccacagcatcatcaccaacctgctgtaccacgtcgtcggctggaccgactggaatctggccctgaatcctgaaggcggccctaactgggtccgaaacttcgtggacagccccatcatcgtggacatcaccaaggacaccttctacaagcagcccatgttctaccacctgggacacttcagcaagttcatccccgagggctctcagcgcgttggactggtggcttcccagaagaacgatctggacgccgtggctctgatgcaccctgatggatctgctgtggtggtggtcctgaaccgcagcagcaaagatgtgcccctgaccatcaaggatcccgccgtgggattcctggaaacaatcagccctggctactccatccacacctacctgtggcgtagacagcagagattcttcgagtagtaactcgaggacggggtgaactacgcctgaggatccgatctttttccctctgccaaaaattatggggacatcatgaagccccttgagcatctgacttctggctaataaaggaaatttattttcattgcaatagtgtgttggaattttttgtgtctctcactcggcctaggtagataagtagcatggcgggttaatcattaactacaaggaacccctagtgatggagttggccactccctctctgcgcgctcgctcgctcactgaggccgggcgaccaaaggtcgcccgacgcccgggctttgcccgggcggcctcagtgagcgagcgagcgcgcag

SEQ ID NO: 1764 - DNA, 3512 bp, Artificial Sequence
  source: /note="Description of Artificial Sequence: Synthetic polynucleotide"
ctgcgcgctcgctcgctcactgaggccgcccgggcaaagcccgggcgtcgggcgacctttggtcgcccggcctcagtgagcgagcgagcgcgcagagagggagtggccaactccatcactaggggttccttgtagttaatgattaacccgccatgctacttatctaccagggtaatggggatcctctagaactatagctagtcgacattgattattgactagttattaatagtaatcaattacggggtcattagttcatagcccatatatggagttccgcgttacataacttacggtaaatggcccgcctggctgaccgcccaacgacccccgcccattgacgtcaataatgacgtatgttcccatagtaacgccaatagggactttccattgacgtcaatgggtggagtatttacggtaaactgcccacttggcagtacatcaagtgtatcatatgccaagtacgccccctattgacgtcaatgacggtaaatggcccgcctggcattatgcccagtacatgaccttatgggactttcctacttggcagtacatctacgtattagtcatcgctattaccatgtcgaggccacgttctgcttcactctccccatctcccccccctccccacccccaattttgtatttatttattttttaattattttgtgcagcgatgggggcggggggggggggcgcgcgccaggcggggcggggcggggcgaggggcggggcggggcgaggcggagaggtgcggcggcagccaatcagagcggcgcgctccgaaagtttccttttatggcgaggcggcggcggcggcggccctataaaaagcgaagcgcgcggcgggcgggagcaagcttcgtttagtgaaccgtcagatcgcctggagacgccatccacgctgttttgacctccatagaagacaccgggaccgatccagcctccgcggattcgaatcccggccgggaacggtgcattggaacgcggattccccgtgccaagagtgacgtaagtaccgcctatagagtctataggcccacaaaaaatgctttcttcttttaatatacttttttgtttatcttatttctaatactttccctaatctctttctttcagggcaataatgatacaatgtatcatgcctctttgcaccattctaaagaataacagtgataatttctgggttaaggcaatagcaatatttctgcatataaatatttctgcatataaattgtaactgatgtaagaggtttcatattgctaatagcagctacaatccagctaccattctgcttttattttatggttgggataaggctggattattctgagtccaagctaggcccttttgctaatcatgttcatacctcttatcttcctcccacagctcctgggcaacgtgctggtctgtgtgctggcccatcactttggcaaagaattgggattcgaaccggtgccgccaccatggaattcagcagccccagcagagaggaatgccccaagcctctgagccgggtgtcaatcatggccggatctctgacaggactgctgctgcttcaggccgtgtcttgggcttctggcgctagaccttgcatccccaagagcttcggctacagcagcgtcgtgtgcgtgtgcaatgccacctactgcgacagcttcgaccctcctacctttcctgctctgggcaccttcagcagatacgagagcaccagatccggcagacggatggaactgagcatgggacccatccaggccaatcacacaggcactggcctgctgctgacactgcagcctgagcagaaattccagaaagtgaaaggcttcggcggagccatgacagatgccgccgctctgaatatcctggctctgtctccaccagctcagaacctgctgctcaagagctacttcagcgaggaaggcatcggctacaacatcatcagagtgcccatggccagctgcgacttcagcatcaggacctacacctacgccgacacacccgacgatttccagctgcacaacttcagcctgcctgaagaggacaccaagctgaagatccctctgatccacagagccctgcagctggcacaaagacccgtgtcactgctggcctctccatggacatctcccacctggctgaaaacaaatggcgccgtgaatggcaagggcagcctgaaaggccaacctggcgacatctaccaccagacctgggccagatacttcgtgaagttcctggacgcctatgccgagcacaagctgcagttttgggccgtgacagccgagaacgaaccttctgctggactgctgagcggctacccctttcagtgcctgggctttacacccgagcaccagcgggactttatcgcccgtgatctgggacccacactggccaatagcacccaccataatgtgcggctgctgatgctggacgaccagagactgcttctgccccactgggctaaagtggtgctgacagatcctgaggccgccaaatacgtgcacggaatcgccgtgcactggtatctggactttctggcccctgccaaggccacactgggagagacacacagactgttccccaacaccatgctgttcgccagcgaagcctgtgtgggcagcaagttttgggaacagagcgtgcggctcggcagctgggatagaggcatgcagtacagccacagcatcatcaccaacctgctgtaccacgtcgtcggctggaccgactggaatctggccctgaatcctgaaggcggccctaactgggtccgaaacttcgtggacagccccatcatcgtggacatcaccaaggacaccttctacaagcagcccatgttctaccacctgggacacttcagcaagttcatccccgagggctctcagcgcgttggactggtggcttcccagaagaacgatctggacgccgtggctctgatgcaccctgatggatctgctgtggtggtggtcctgaaccgcagcagcaaagatgtgcccctgaccatcaaggatcccgccgtgggattcctggaaacaatcagccctggctactccatccacacctacctgtggcgtagacagggaggggggggttcgggtggcggcggaagtgggggcggtggttctctacggaagctgcggaagcggctactgctgcggaaacttcggaaacggctactgtagtaactcgaggacggggtgaactacgcctgaggatccgatctttttccctctgccaaaaattatggggacatcatgaagccccttgagcatctgacttctggctaataaaggaaatttattttcattgcaatagtgtgttggaattttttgtgtctctcactcggcctaggtagataagtagcatggcgggttaatcattaactacaaggaacccctagtgatggagttggccactccctctctgcgcgctcgctcgctcactgaggccgggcgaccaaaggtcgcccgacgcccgggctttgcccgggcggcctcagtgagcgagcgagcgcgcag

SEQ ID NO: 1765 - DNA, 3500 bp, Artificial Sequence
  source: /note="Description of Artificial Sequence: Synthetic polynucleotide"
ctgcgcgctcgctcgctcactgaggccgcccgggcaaagcccgggcgtcgggcgacctttggtcgcccggcctcagtgagcgagcgagcgcgcagagagggagtggccaactccatcactaggggttccttgtagttaatgattaacccgccatgctacttatctaccagggtaatggggatcctctagaactatagctagtcgacattgattattgactagttattaatagtaatcaattacggggtcattagttcatagcccatatatggagttccgcgttacataacttacggtaaatggcccgcctggctgaccgcccaacgacccccgcccattgacgtcaataatgacgtatgttcccatagtaacgccaatagggactttccattgacgtcaatgggtggagtatttacggtaaactgcccacttggcagtacatcaagtgtatcatatgccaagtacgccccctattgacgtcaatgacggtaaatggcccgcctggcattatgcccagtacatgaccttatgggactttcctacttggcagtacatctacgtattagtcatcgctattaccatgtcgaggccacgttctgcttcactctccccatctcccccccctccccacccccaattttgtatttatttattttttaattattttgtgcagcgatgggggcggggggggggggcgcgcgccaggcggggcggggcggggcgaggggcggggcggggcgaggcggagaggtgcggcggcagccaatcagagcggcgcgctccgaaagtttccttttatggcgaggcggcggcggcggcggccctataaaaagcgaagcgcgcggcgggcgggagcaagcttcgtttagtgaaccgtcagatcgcctggagacgccatccacgctgttttgacctccatagaagacaccgggaccgatccagcctccgcggattcgaatcccggccgggaacggtgcattggaacgcggattccccgtgccaagagtgacgtaagtaccgcctatagagtctataggcccacaaaaaatgctttcttcttttaatatacttttttgtttatcttatttctaatactttccctaatctctttctttcagggcaataatgatacaatgtatcatgcctctttgcaccattctaaagaataacagtgataatttctgggttaaggcaatagcaatatttctgcatataaatatttctgcatataaattgtaactgatgtaagaggtttcatattgctaatagcagctacaatccagctaccattctgcttttattttatggttgggataaggctggattattctgagtccaagctaggcccttttgctaatcatgttcatacctcttatcttcctcccacagctcctgggcaacgtgctggtctgtgtgctggcccatcactttggcaaagaattgggattcgaaccggtgccgccaccatggaattcagcagccccagcagagaggaatgccccaagcctctgagccgggtgtcaatcatggccggatctctgacaggactgctgctgcttcaggccgtgtcttgggcttctggcgctagaccttgcatccccaagagcttcggctacagcagcgtcgtgtgcgtgtgcaatgccacctactgcgacagcttcgaccctcctacctttcctgctctgggcaccttcagcagatacgagagcaccagatccggcagacggatggaactgagcatgggacccatccaggccaatcacacaggcactggcctgctgctgacactgcagcctgagcagaaattccagaaagtgaaaggcttcggcggagccatgacagatgccgccgctctgaatatcctggctctgtctccaccagctcagaacctgctgctcaagagctacttcagcgaggaaggcatcggctacaacatcatcagagtgcccatggccagctgcgacttcagcatcaggacctacacctacgccgacacacccgacgatttccagctgcacaacttcagcctgcctgaagaggacaccaagctgaagatccctctgatccacagagccctgcagctggcacaaagacccgtgtcactgctggcctctccatggacatctcccacctggctgaaaacaaatggcgccgtgaatggcaagggcagcctgaaaggccaacctggcgacatctaccaccagacctgggccagatacttcgtgaagttcctggacgcctatgccgagcacaagctgcagttttgggccgtgacagccgagaacgaaccttctgctggactgctgagcggctacccctttcagtgcctgggctttacacccgagcaccagcgggactttatcgcccgtgatctgggacccacactggccaatagcacccaccataatgtgcggctgctgatgctggacgaccagagactgcttctgccccactgggctaaagtggtgctgacagatcctgaggccgccaaatacgtgcacggaatcgccgtgcactggtatctggactttctggcccctgccaaggccacactgggagagacacacagactgttccccaacaccatgctgttcgccagcgaagcctgtgtgggcagcaagttttgggaacagagcgtgcggctcggcagctgggatagaggcatgcagtacagccacagcatcatcaccaacctgctgtaccacgtcgtcggctggaccgactggaatctggccctgaatcctgaaggcggccctaactgggtccgaaacttcgtggacagccccatcatcgtggacatcaccaaggacaccttctacaagcagcccatgttctaccacctgggacacttcagcaagttcatccccgagggctctcagcgcgttggactggtggcttcccagaagaacgatctggacgccgtggctctgatgcaccctgatggatctgctgtggtggtggtcctgaaccgcagcagcaaagatgtgcccctgaccatcaaggatcccgccgtgggattcctggaaacaatcagccctggctactccatccacacctacctgtggcgtagacagggaggggggggttcgggtggcggcggaagtgggggcggtggttcttatggcaggaaaaagcggaggcaaaggcgccgccccccccagtagtaactcgaggacggggtgaactacgcctgaggatccgatctttttccctctgccaaaaattatggggacatcatgaagccccttgagcatctgacttctggctaataaaggaaatttattttcattgcaatagtgtgttggaattttttgtgtctctcactcggcctaggtagataagtagcatggcgggttaatcattaactacaaggaacccctagtgatggagttggccactccctctctgcgcgctcgctcgctcactgaggccgggcgaccaaaggtcgcccgacgcccgggctttgcccgggcggcctcagtgagcgagcgagcgcgcag

SEQ ID NO: 1766 - DNA, 4463 bp, Artificial Sequence
  source: /note="Description of Artificial Sequence: Synthetic polynucleotide"
ctgcgcgctcgctcgctcactgaggccgcccgggcaaagcccgggcgtcgggcgacctttggtcgcccggcctcagtgagcgagcgagcgcgcagagagggagtggccaactccatcactaggggttccttgtagttaatgattaacccgccatgctacttatctaccagggtaatggggatcctctagaactatagctagtcgacattgattattgactagttattaatagtaatcaattacggggtcattagttcatagcccatatatggagttccgcgttacataacttacggtaaatggcccgcctggctgaccgcccaacgacccccgcccattgacgtcaataatgacgtatgttcccatagtaacgccaatagggactttccattgacgtcaatgggtggagtatttacggtaaactgcccacttggcagtacatcaagtgtatcatatgccaagtacgccccctattgacgtcaatgacggtaaatggcccgcctggcattatgcccagtacatgaccttatgggactttcctacttggcagtacatctacgtattagtcatcgctattaccatgtcgaggccacgttctgcttcactctccccatctcccccccctccccacccccaattttgtatttatttattttttaattattttgtgcagcgatgggggcggggggggggggcgcgcgccaggcggggcggggcggggcgaggggcggggcggggcgaggcggagaggtgcggcggcagccaatcagagcggcgcgctccgaaagtttccttttatggcgaggcggcggcggcggcggccctataaaaagcgaagcgcgcggcgggcgggagcaagctccggtgccgccaccatggaattcagcagccccagcagagaggaatgccccaagcctctgagccgggtgtcaatcatggccggatctctgacaggactgctgctgcttcaggccgtgtcttgggcttctggcgctagaccttgcatccccaagagcttcggctacagcagcgtcgtgtgcgtgtgcaatgccacctactgcgacagcttcgaccctcctacctttcctgctctgggcaccttcagcagatacgagagcaccagatccggcagacggatggaactgagcatgggacccatccaggccaatcacacaggcactggcctgctgctgacactgcagcctgagcagaaattccagaaagtgaaaggcttcggcggagccatgacagatgccgccgctctgaatatcctggctctgtctccaccagctcagaacctgctgctcaagagctacttcagcgaggaaggcatcggctacaacatcatcagagtgcccatggccagctgcgacttcagcatcaggacctacacctacgccgacacacccgacgatttccagctgcacaacttcagcctgcctgaagaggacaccaagctgaagatccctctgatccacagagccctgcagctggcacaaagacccgtgtcactgctggcctctccatggacatctcccacctggctgaaaacaaatggcgccgtgaatggcaagggcagcctgaaaggccaacctggcgacatctaccaccagacctgggccagatacttcgtgaagttcctggacgcctatgccgagcacaagctgcagttttgggccgtgacagccgagaacgaaccttctgctggactgctgagcggctacccctttcagtgcctgggctttacacccgagcaccagcgggactttatcgcccgtgatctgggacccacactggccaatagcacccaccataatgtgcggctgctgatgctggacgaccagagactgcttctgccccactgggctaaagtggtgctgacagatcctgaggccgccaaatacgtgcacggaatcgccgtgcactggtatctggactttctggcccctgccaaggccacactgggagagacacacagactgttccccaacaccatgctgttcgccagcgaagcctgtgtgggcagcaagttttgggaacagagcgtgcggctcggcagctgggatagaggcatgcagtacagccacagcatcatcaccaacctgctgtaccacgtcgtcggctggaccgactggaatctggccctgaatcctgaaggcggccctaactgggtccgaaacttcgtggacagccccatcatcgtggacatcaccaaggacaccttctacaagcagcccatgttctaccacctgggacacttcagcaagttcatccccgagggctctcagcgcgttggactggtggcttcccagaagaacgatctggacgccgtggctctgatgcaccctgatggatctgctgtggtggtggtcctgaaccgcagcagcaaagatgtgcccctgaccatcaaggatcccgccgtgggattcctggaaacaatcagccctggctactccatccacacctacctgtggcgtagacagagaaagaggcgagagggcagaggaagtcttctaacatgcggtgacgtggaggagaatcccggccctatgtacgccctcttcctcctggccagcctcctgggcgcggctctagccggcccggtccttggactgaaagaatgcaccaggggctcggcagtgtggtgccagaatgtgaagacggcgtccgactgcggggcagtgaagcactgcctgcagaccgtttggaacaagccaacagtgaaatcccttccctgcgacatatgcaaagacgttgtcaccgcagctggtgatatgctgaaggacaatgccactgaggaggagatccttgtttacttggagaagacctgtgactggcttccgaaaccgaacatgtctgcttcatgcaaggagatagtggactcctacctccctgtcatcctggacatcattaaaggagaaatgagccgtcctggggaggtgtgctctgctctcaacctctgcgagtctctccagaagcacctagcagagctgaatcaccagaagcagctggagtccaataagatcccagagctggacatgactgaggtggtggcccccttcatggccaacatccctctcctcctctaccctcaggacggcccccgcagcaagccccagccaaaggataatggggacgtttgccaggactgcattcagatggtgactgacatccagactgctgtacggaccaactccacctttgtccaggccttggtggaacatgtcaaggaggagtgtgaccgcctgggccctggcatggccgacatatgcaagaactatatcagccagtattctgaaattgctatccagatgatgatgcacatgcaacccaaggagatctgtgcgctggttgggttctgtgatgaggtgaaagagatgcccatgcagactctggtccccgccaaagtggcctccaagaatgtcatccctgccctggaactggtggagcccattaagaagcacgaggtcccagcaaagtctgatgtttactgtgaggtgtgtgaattcctggtgaaggaggtgaccaagctgattgacaacaacaagactgagaaagaaatactcgacgcttttgacaaaatgtgctcgaagctgccgaagtccctgtcggaagagtgccaggaggtggtggacacgtacggcagctccatcctgtccatcctgctggaggaggtcagccctgagctggtgtgcagcatgctgcacctctgctctggcacgcggctgcctgcactgaccgttcacgtgactcagccaaaggacggtggcttctgcgaagtgtgcaagaagctggtgggttatttggatcgcaacctggagaaaaacagcaccaagcaggagatcctggctgctcttgagaaaggctgcagcttcctgccagacccttaccagaagcagtgtgatcagtttgtggcagagtacgagcccgtgctgatcgagatcctggtggaggtgatggatccttccttcgtgtgcttgaaaattggagcctgcccctcggcccataagcccttgttgggaactgagaagtgtatatggggcccaagctactggtgccagaacacagagacagcagcccagtgcaatgctgtcgagcattgcaaacgccatgtgtggaactagtagtaactcgaggacggggtgaactacgcctgaggatccgatctttttccctctgccaaaaattatggggacatcatgaagccccttgagcatctgacttctggctaataaaggaaatttattttcattgcaatagtgtgttggaattttttgtgtctctcactcggcctaggtagataagtagcatggcgggttaatcattaactacaaggaacccctagtgatggagttggccactccctctctgcgcgctcgctcgctcactgaggccgggcgaccaaaggtcgcccgacgcccgggctttgcccgggcggcctcagtgagcgagcgagcgcgcag

SEQ ID NO: 1767 - DNA, 3878 bp, Artificial Sequence
  source: /note="Description of Artificial Sequence: Synthetic polynucleotide"
ctgcgcgctcgctcgctcactgaggccgcccgggcaaagcccgggcgtcgggcgacctttggtcgcccggcctcagtgagcgagcgagcgcgcagagagggagtggccaactccatcactaggggttccttgtagttaatgattaacccgccatgctacttatctaccagggtaatggggatcctctagaactatagctagtcgacattgattattgactagttattaatagtaatcaattacggggtcattagttcatagcccatatatggagttccgcgttacataacttacggtaaatggcccgcctggctgaccgcccaacgacccccgcccattgacgtcaataatgacgtatgttcccatagtaacgccaatagggactttccattgacgtcaatgggtggagtatttacggtaaactgcccacttggcagtacatcaagtgtatcatatgccaagtacgccccctattgacgtcaatgacggtaaatggcccgcctggcattatgcccagtacatgaccttatgggactttcctacttggcagtacatctacgtattagtcatcgctattaccatgtcgaggccacgttctgcttcactctccccatctcccccccctccccacccccaattttgtatttatttattttttaattattttgtgcagcgatgggggcggggggggggggcgcgcgccaggcggggcggggcggggcgaggggcggggcggggcgaggcggagaggtgcggcggcagccaatcagagcggcgcgctccgaaagtttccttttatggcgaggcggcggcggcggcggccctataaaaagcgaagcgcgcggcgggcgggagcaagcttcgtttagtgaaccgtcagatcgcctggagacgccatccacgctgttttgacctccatagaagacaccgggaccgatccagcctccgcggattcgaatcccggccgggaacggtgcattggaacgcggattccccgtgccaagagtgacgtaagtaccgcctatagagtctataggcccacaaaaaatgctttcttcttttaatatacttttttgtttatcttatttctaatactttccctaatctctttctttcagggcaataatgatacaatgtatcatgcctctttgcaccattctaaagaataacagtgataatttctgggttaaggcaatagcaatatttctgcatataaatatttctgcatataaattgtaactgatgtaagaggtttcatattgctaatagcagctacaatccagctaccattctgcttttattttatggttgggataaggctggattattctgagtccaagctaggcccttttgctaatcatgttcatacctcttatcttcctcccacagctcctgggcaacgtgctggtctgtgtgctggcccatcactttggcaaagaattgggattcgaaccggtgccgccaccatggaattcagcagccccagcagagaggaatgccccaagcctctgagccgggtgtcaatcatggccggatctctgacaggactgctgctgcttcaggccgtgtcttgggcttctggcgctagaccttgcatccccaagagcttcggctacagcagcgtcgtgtgcgtgtgcaatgccacctactgcgacagcttcgaccctcctacctttcctgctctgggcaccttcagcagatacgagagcaccagatccggcagacggatggaactgagcatgggacccatccaggccaatcacacaggcactggcctgctgctgacactgcagcctgagcagaaattccagaaagtgaaaggcttcggcggagccatgacagatgccgccgctctgaatatcctggctctgtctccaccagctcagaacctgctgctcaagagctacttcagcgaggaaggcatcggctacaacatcatcagagtgcccatggccagctgcgacttcagcatcaggacctacacctacgccgacacacccgacgatttccagctgcacaacttcagcctgcctgaagaggacaccaagctgaagatccctctgatccacagagccctgcagctggcacaaagacccgtgtcactgctggcctctccatggacatctcccacctggctgaaaacaaatggcgccgtgaatggcaagggcagcctgaaaggccaacctggcgacatctaccaccagacctgggccagatacttcgtgaagttcctggacgcctatgccgagcacaagctgcagttttgggccgtgacagccgagaacgaaccttctgctggactgctgagcggctacccctttcagtgcctgggctttacacccgagcaccagcgggactttatcgcccgtgatctgggacccacactggccaatagcacccaccataatgtgcggctgctgatgctggacgaccagagactgcttctgccccactgggctaaagtggtgctgacagatcctgaggccgccaaatacgtgcacggaatcgccgtgcactggtatctggactttctggcccctgccaaggccacactgggagagacacacagactgttccccaacaccatgctgttcgccagcgaagcctgtgtgggcagcaagttttgggaacagagcgtgcggctcggcagctgggatagaggcatgcagtacagccacagcatcatcaccaacctgctgtaccacgtcgtcggctggaccgactggaatctggccctgaatcctgaaggcggccctaactgggtccgaaacttcgtggacagccccatcatcgtggacatcaccaaggacaccttctacaagcagcccatgttctaccacctgggacacttcagcaagttcatccccgagggctctcagcgcgttggactggtggcttcccagaagaacgatctggacgccgtggctctgatgcaccctgatggatctgctgtggtggtggtcctgaaccgcagcagcaaagatgtgcccctgaccatcaaggatcccgccgtgggattcctggaaacaatcagccctggctactccatccacacctacctgtggcgtagacagagaaagaggcgagagggcagaggaagtcttctaacatgcggtgacgtggaggagaatcccggccctatgtacgccctcttcctcctggccagcctcctgggcgcggctctagccgtgaaagagatgcccatgcagactctggtccccgccaaagtggcctccaagaatgtcatccctgccctggaactggtggagcccattaagaagcacgaggtcccagcaaagtctgatgtttactgtgaggtgtgtgaattcctggtgaaggaggtgaccaagctgattgacaacaacaagactgagaaagaaatactcgacgcttttgacaaaatgtgctcgaagctgccgaagtccctgtcggaagagtgccaggaggtggtggacacgtacggcagctccatcctgtccatcctgctggaggaggtcagccctgagctggtgtgcagcatgctgcacctctgctctggctagtaactcgaggacggggtgaactacgcctgaggatccgatctttttccctctgccaaaaattatggggacatcatgaagccccttgagcatctgacttctggctaataaaggaaatttattttcattgcaatagtgtgttggaattttttgtgtctctcactcggcctaggtagataagtagcatggcgggttaatcattaactacaaggaacccctagtgatggagttggccactccctctctgcgcgctcgctcgctcactgaggccgggcgaccaaaggtcgcccgacgcccgggctttgcccgggcggcctcagtgagcgagcgagcgcgcag

SEQ ID NO: 1768 - DNA, 3767 bp, Artificial Sequence
  source: /note="Description of Artificial Sequence: Synthetic polynucleotide"
ctgcgcgctcgctcgctcactgaggccgcccgggcaaagcccgggcgtcgggcgacctttggtcgcccggcctcagtgagcgagcgagcgcgcagagagggagtggccaactccatcactaggggttccttgtagttaatgattaacccgccatgctacttatctaccagggtaatggggatcctctagaactatagctagtcgacattgattattgactagttattaatagtaatcaattacggggtcattagttcatagcccatatatggagttccgcgttacataacttacggtaaatggcccgcctggctgaccgcccaacgacccccgcccattgacgtcaataatgacgtatgttcccatagtaacgccaatagggactttccattgacgtcaatgggtggagtatttacggtaaactgcccacttggcagtacatcaagtgtatcatatgccaagtacgccccctattgacgtcaatgacggtaaatggcccgcctggcattatgcccagtacatgaccttatgggactttcctacttggcagtacatctacgtattagtcatcgctattaccatgtcgaggccacgttctgcttcactctccccatctcccccccctccccacccccaattttgtatttatttattttttaattattttgtgcagcgatgggggcggggggggggggcgcgcgccaggcggggcggggcggggcgaggggcggggcggggcgaggcggagaggtgcggcggcagccaatcagagcggcgcgctccgaaagtttccttttatggcgaggcggcggcggcggcggccctataaaaagcgaagcgcgcggcgggcgggagcaagcttcgtttagtgaaccgtcagatcgcctggagacgccatccacgctgttttgacctccatagaagacaccgggaccgatccagcctccgcggattcgaatcccggccgggaacggtgcattggaacgcggattccccgtgccaagagtgacgtaagtaccgcctatagagtctataggcccacaaaaaatgctttcttcttttaatatacttttttgtttatcttatttctaatactttccctaatctctttctttcagggcaataatgatacaatgtatcatgcctctttgcaccattctaaagaataacagtgataatttctgggttaaggcaatagcaatatttctgcatataaatatttctgcatataaattgtaactgatgtaagaggtttcatattgctaatagcagctacaatccagctaccattctgcttttattttatggttgggataaggctggattattctgagtccaagctaggcccttttgctaatcatgttcatacctcttatcttcctcccacagctcctgggcaacgtgctggtctgtgtgctggcccatcactttggcaaagaattgggattcgaaccggtgccgccaccatggaattcagcagccccagcagagaggaatgccccaagcctctgagccgggtgtcaatcatggccggatctctgacaggactgctgctgcttcaggccgtgtcttgggcttctggcgctagaccttgcatccccaagagcttcggctacagcagcgtcgtgtgcgtgtgcaatgccacctactgcgacagcttcgaccctcctacctttcctgctctgggcaccttcagcagatacgagagcaccagatccggcagacggatggaactgagcatgggacccatccaggccaatcacacaggcactggcctgctgctgacactgcagcctgagcagaaattccagaaagtgaaaggcttcggcggagccatgacagatgccgccgctctgaatatcctggctctgtctccaccagctcagaacctgctgctcaagagctacttcagcgaggaaggcatcggctacaacatcatcagagtgcccatggccagctgcgacttcagcatcaggacctacacctacgccgacacacccgacgatttccagctgcacaacttcagcctgcctgaagaggacaccaagctgaagatccctctgatccacagagccctgcagctggcacaaagacccgtgtcactgctggcctctccatggacatctcccacctggctgaaaacaaatggcgccgtgaatggcaagggcagcctgaaaggccaacctggcgacatctaccaccagacctgggccagatacttcgtgaagttcctggacgcctatgccgagcacaagctgcagttttgggccgtgacagccgagaacgaaccttctgctggactgctgagcggctacccctttcagtgcctgggctttacacccgagcaccagcgggactttatcgcccgtgatctgggacccacactggccaatagcacccaccataatgtgcggctgctgatgctggacgaccagagactgcttctgccccactgggctaaagtggtgctgacagatcctgaggccgccaaatacgtgcacggaatcgccgtgcactggtatctggactttctggcccctgccaaggccacactgggagagacacacagactgttccccaacaccatgctgttcgccagcgaagcctgtgtgggcagcaagttttgggaacagagcgtgcggctcggcagctgggatagaggcatgcagtacagccacagcatcatcaccaacctgctgtaccacgtcgtcggctggaccgactggaatctggccctgaatcctgaaggcggccctaactgggtccgaaacttcgtggacagccccatcatcgtggacatcaccaaggacaccttctacaagcagcccatgttctaccacctgggacacttcagcaagttcatccccgagggctctcagcgcgttggactggtggcttcccagaagaacgatctggacgccgtggctctgatgcaccctgatggatctgctgtggtggtggtcctgaaccgcagcagcaaagatgtgcccctgaccatcaaggatcccgccgtgggattcctggaaacaatcagccctggctactccatccacacctacctgtggcgtagacagagaaagaggcgagagggcagaggaagtcttctaacatgcggtgacgtggaggagaatcccggccctatgtacgccctcttcctcctggccagcctcctgggcgcggctctagcctctgatgtttactgtgaggtgtgtgaattcctggtgaaggaggtgaccaagctgattgacaacaacaagactgagaaagaaatactcgacgcttttgacaaaatgtgctcgaagctgccgaagtccctgtcggaagagtgccaggaggtggtggacacgtacggcagctccatcctgtccatcctgctggaggaggtcagccctgagctggtgtgcagcatgctgcacctctgctctggctagtaactcgaggacggggtgaactacgcctgaggatccgatctttttccctctgccaaaaattatggggacatcatgaagccccttgagcatctgacttctggctaataaaggaaatttattttcattgcaatagtgtgttggaattttttgtgtctctcactcggcctaggtagataagtagcatggcgggttaatcattaactacaaggaacccctagtgatggagttggccactccctctctgcgcgctcgctcgctcactgaggccgggcgaccaaaggtcgcccgacgcccgggctttgcccgggcggcctcagtgagcgagcgagcgcgcag

SEQ ID NO: 1769 - DNA, 3560 bp, Artificial Sequence
  source: /note="Description of Artificial Sequence: Synthetic polynucleotide"
ctgcgcgctcgctcgctcactgaggccgcccgggcaaagcccgggcgtcgggcgacctttggtcgcccggcctcagtgagcgagcgagcgcgcagagagggagtggccaactccatcactaggggttccttgtagttaatgattaacccgccatgctacttatctaccagggtaatggggatcctctagaactatagctagtcgacattgattattgactagttattaatagtaatcaattacggggtcattagttcatagcccatatatggagttccgcgttacataacttacggtaaatggcccgcctggctgaccgcccaacgacccccgcccattgacgtcaataatgacgtatgttcccatagtaacgccaatagggactttccattgacgtcaatgggtggagtatttacggtaaactgcccacttggcagtacatcaagtgtatcatatgccaagtacgccccctattgacgtcaatgacggtaaatggcccgcctggcattatgcccagtacatgaccttatgggactttcctacttggcagtacatctacgtattagtcatcgctattaccatgtcgaggccacgttctgcttcactctccccatctcccccccctccccacccccaattttgtatttatttattttttaattattttgtgcagcgatgggggcggggggggggggcgcgcgccaggcggggcggggcggggcgaggggcggggcggggcgaggcggagaggtgcggcggcagccaatcagagcggcgcgctccgaaagtttccttttatggcgaggcggcggcggcggcggccctataaaaagcgaagcgcgcggcgggcgggagcaagcttcgtttagtgaaccgtcagatcgcctggagacgccatccacgctgttttgacctccatagaagacaccgggaccgatccagcctccgcggattcgaatcccggccgggaacggtgcattggaacgcggattccccgtgccaagagtgacgtaagtaccgcctatagagtctataggcccacaaaaaatgctttcttcttttaatatacttttttgtttatcttatttctaatactttccctaatctctttctttcagggcaataatgatacaatgtatcatgcctctttgcaccattctaaagaataacagtgataatttctgggttaaggcaatagcaatatttctgcatataaatatttctgcatataaattgtaactgatgtaagaggtttcatattgctaatagcagctacaatccagctaccattctgcttttattttatggttgggataaggctggattattctgagtccaagctaggcccttttgctaatcatgttcatacctcttatcttcctcccacagctcctgggcaacgtgctggtctgtgtgctggcccatcactttggcaaagaattgggattcgaaccggtgccgccaccatggaattcagcagccccagcagagaggaatgccccaagcctctgagccgggtgtcaatcatggccggatctctgacaggactgctgctgcttcaggccgtgtcttgggcttctggcgctagaccttgcatccccaagagcttcggctacagcagcgtcgtgtgcgtgtgcaatgccacctactgcgacagcttcgaccctcctacctttcctgctctgggcaccttcagcagatacgagagcaccagatccggcagacggatggaactgagcatgggacccatccaggccaatcacacaggcactggcctgctgctgacactgcagcctgagcagaaattccagaaagtgaaaggcttcggcggagccatgacagatgccgccgctctgaatatcctggctctgtctccaccagctcagaacctgctgctcaagagctacttcagcgaggaaggcatcggctacaacatcatcagagtgcccatggccagctgcgacttcagcatcaggacctacacctacgccgacacacccgacgatttccagctgcacaacttcagcctgcctgaagaggacaccaagctgaagatccctctgatccacagagccctgcagctggcacaaagacccgtgtcactgctggcctctccatggacatctcccacctggctgaaaacaaatggcgccgtgaatggcaagggcagcctgaaaggccaacctggcgacatctaccaccagacctgggccagatacttcgtgaagttcctggacgcctatgccgagcacaagctgcagttttgggccgtgacagccgagaacgaaccttctgctggactgctgagcggctacccctttcagtgcctgggctttacacccgagcaccagcgggactttatcgcccgtgatctgggacccacactggccaatagcacccaccataatgtgcggctgctgatgctggacgaccagagactgcttctgccccactgggctaaagtggtgctgacagatcctgaggccgccaaatacgtgcacggaatcgccgtgcactggtatctggactttctggcccctgccaaggccacactgggagagacacacagactgttccccaacaccatgctgttcgccagcgaagcctgtgtgggcagcaagttttgggaacagagcgtgcggctcggcagctgggatagaggcatgcagtacagccacagcatcatcaccaacctgctgtaccacgtcgtcggctggaccgactggaatctggccctgaatcctgaaggcggccctaactgggtccgaaacttcgtggacagccccatcatcgtggacatcaccaaggacaccttctacaagcagcccatgttctaccacctgggacacttcagcaagttcatccccgagggctctcagcgcgttggactggtggcttcccagaagaacgatctggacgccgtggctctgatgcaccctgatggatctgctgtggtggtggtcctgaaccgcagcagcaaagatgtgcccctgaccatcaaggatcccgccgtgggattcctggaaacaatcagccctggctactccatccacacctacctgtggcgtagacagggaggggggggttcgggtggcggcggaagtgggggcggtggttcttccgtaatcgacgccttacagtataagctggagggaaccaccagattgacaaggaaacgagggcttaagcttgctactgcactatccctgagcaataaattttagtaactcgaggacggggtgaactacgcctgaggatccgatctttttccctctgccaaaaattatggggacatcatgaagccccttgagcatctgacttctggctaataaaggaaatttattttcattgcaatagtgtgttggaattttttgtgtctctcactcggcctaggtagataagtagcatggcgggttaatcattaactacaaggaacccctagtgatggagttggccactccctctctgcgcgctcgctcgctcactgaggccgggcgaccaaaggtcgcccgacgcccgggctttgcccgggcggcctcagtgagcgagcgagcgcgcag

SEQ ID NO: 1770 - DNA, 3500 bp, Artificial Sequence
  source: /note="Description of Artificial Sequence: Synthetic polynucleotide"
ctgcgcgctcgctcgctcactgaggccgcccgggcaaagcccgggcgtcgggcgacctttggtcgcccggcctcagtgagcgagcgagcgcgcagagagggagtggccaactccatcactaggggttccttgtagttaatgattaacccgccatgctacttatctaccagggtaatggggatcctctagaactatagctagtcgacattgattattgactagttattaatagtaatcaattacggggtcattagttcatagcccatatatggagttccgcgttacataacttacggtaaatggcccgcctggctgaccgcccaacgacccccgcccattgacgtcaataatgacgtatgttcccatagtaacgccaatagggactttccattgacgtcaatgggtggagtatttacggtaaactgcccacttggcagtacatcaagtgtatcatatgccaagtacgccccctattgacgtcaatgacggtaaatggcccgcctggcattatgcccagtacatgaccttatgggactttcctacttggcagtacatctacgtattagtcatcgctattaccatgtcgaggccacgttctgcttcactctccccatctcccccccctccccacccccaattttgtatttatttattttttaattattttgtgcagcgatgggggcggggggggggggcgcgcgccaggcggggcggggcggggcgaggggcggggcggggcgaggcggagaggtgcggcggcagccaatcagagcggcgcgctccgaaagtttccttttatggcgaggcggcggcggcggcggccctataaaaagcgaagcgcgcggcgggcgggagcaagcttcgtttagtgaaccgtcagatcgcctggagacgccatccacgctgttttgacctccatagaagacaccgggaccgatccagcctccgcggattcgaatcccggccgggaacggtgcattggaacgcggattccccgtgccaagagtgacgtaagtaccgcctatagagtctataggcccacaaaaaatgctttcttcttttaatatacttttttgtttatcttatttctaatactttccctaatctctttctttcagggcaataatgatacaatgtatcatgcctctttgcaccattctaaagaataacagtgataatttctgggttaaggcaatagcaatatttctgcatataaatatttctgcatataaattgtaactgatgtaagaggtttcatattgctaatagcagctacaatccagctaccattctgcttttattttatggttgggataaggctggattattctgagtccaagctaggcccttttgctaatcatgttcatacctcttatcttcctcccacagctcctgggcaacgtgctggtctgtgtgctggcccatcactttggcaaagaattgggattcgaaccggtgccgccaccatggaattcagcagccccagcagagaggaatgccccaagcctctgagccgggtgtcaatcatggccggatctctgacaggactgctgctgcttcaggccgtgtcttgggcttctggctatggcaggaaaaagcggaggcaaaggcgccgccccccccagggaggggggggttcgggtggcggcggaagtgggggcggtggttctgctagaccttgcatccccaagagcttcggctacagcagcgtcgtgtgcgtgtgcaatgccacctactgcgacagcttcgaccctcctacctttcctgctctgggcaccttcagcagatacgagagcaccagatccggcagacggatggaactgagcatgggacccatccaggccaatcacacaggcactggcctgctgctgacactgcagcctgagcagaaattccagaaagtgaaaggcttcggcggagccatgacagatgccgccgctctgaatatcctggctctgtctccaccagctcagaacctgctgctcaagagctacttcagcgaggaaggcatcggctacaacatcatcagagtgcccatggccagctgcgacttcagcatcaggacctacacctacgccgacacacccgacgatttccagctgcacaacttcagcctgcctgaagaggacaccaagctgaagatccctctgatccacagagccctgcagctggcacaaagacccgtgtcactgctggcctctccatggacatctcccacctggctgaaaacaaatggcgccgtgaatggcaagggcagcctgaaaggccaacctggcgacatctaccaccagacctgggccagatacttcgtgaagttcctggacgcctatgccgagcacaagctgcagttttgggccgtgacagccgagaacgaaccttctgctggactgctgagcggctacccctttcagtgcctgggctttacacccgagcaccagcgggactttatcgcccgtgatctgggacccacactggccaatagcacccaccataatgtgcggctgctgatgctggacgaccagagactgcttctgccccactgggctaaagtggtgctgacagatcctgaggccgccaaatacgtgcacggaatcgccgtgcactggtatctggactttctggcccctgccaaggccacactgggagagacacacagactgttccccaacaccatgctgttcgccagcgaagcctgtgtgggcagcaagttttgggaacagagcgtgcggctcggcagctgggatagaggcatgcagtacagccacagcatcatcaccaacctgctgtaccacgtcgtcggctggaccgactggaatctggccctgaatcctgaaggcggccctaactgggtccgaaacttcgtggacagccccatcatcgtggacatcaccaaggacaccttctacaagcagcccatgttctaccacctgggacacttcagcaagttcatccccgagggctctcagcgcgttggactggtggcttcccagaagaacgatctggacgccgtggctctgatgcaccctgatggatctgctgtggtggtggtcctgaaccgcagcagcaaagatgtgcccctgaccatcaaggatcccgccgtgggattcctggaaacaatcagccctggctactccatccacacctacctgtggcgtagacagtagtaactcgaggacggggtgaactacgcctgaggatccgatctttttccctctgccaaaaattatggggacatcatgaagccccttgagcatctgacttctggctaataaaggaaatttattttcattgcaatagtgtgttggaattttttgtgtctctcactcggcctaggtagataagtagcatggcgggttaatcattaactacaaggaacccctagtgatggagttggccactccctctctgcgcgctcgctcgctcactgaggccgggcgaccaaaggtcgcccgacgcccgggctttgcccgggcggcctcagtgagcgagcgagcgcgcag

SEQ ID NO: 1771 - DNA, 3458 bp, Artificial Sequence
  source: /note="Description of Artificial Sequence: Synthetic polynucleotide"
ctgcgcgctcgctcgctcactgaggccgcccgggcaaagcccgggcgtcgggcgacctttggtcgcccggcctcagtgagcgagcgagcgcgcagagagggagtggccaactccatcactaggggttccttgtagttaatgattaacccgccatgctacttatctaccagggtaatggggatcctctagaactatagctagtcgacattgattattgactagttattaatagtaatcaattacggggtcattagttcatagcccatatatggagttccgcgttacataacttacggtaaatggcccgcctggctgaccgcccaacgacccccgcccattgacgtcaataatgacgtatgttcccatagtaacgccaatagggactttccattgacgtcaatgggtggagtatttacggtaaactgcccacttggcagtacatcaagtgtatcatatgccaagtacgccccctattgacgtcaatgacggtaaatggcccgcctggcattatgcccagtacatgaccttatgggactttcctacttggcagtacatctacgtattagtcatcgctattaccatgtcgaggccacgttctgcttcactctccccatctcccccccctccccacccccaattttgtatttatttattttttaattattttgtgcagcgatgggggcggggggggggggcgcgcgccaggcggggcggggcggggcgaggggcggggcggggcgaggcggagaggtgcggcggcagccaatcagagcggcgcgctccgaaagtttccttttatggcgaggcggcggcggcggcggccctataaaaagcgaagcgcgcggcgggcgggagcaagcttcgtttagtgaaccgtcagatcgcctggagacgccatccacgctgttttgacctccatagaagacaccgggaccgatccagcctccgcggattcgaatcccggccgggaacggtgcattggaacgcggattccccgtgccaagagtgacgtaagtaccgcctatagagtctataggcccacaaaaaatgctttcttcttttaatatacttttttgtttatcttatttctaatactttccctaatctctttctttcagggcaataatgatacaatgtatcatgcctctttgcaccattctaaagaataacagtgataatttctgggttaaggcaatagcaatatttctgcatataaatatttctgcatataaattgtaactgatgtaagaggtttcatattgctaatagcagctacaatccagctaccattctgcttttattttatggttgggataaggctggattattctgagtccaagctaggcccttttgctaatcatgttcatacctcttatcttcctcccacagctcctgggcaacgtgctggtctgtgtgctggcccatcactttggcaaagaattgggattcgaaccggtgccgccaccatggaattcagcagccccagcagagaggaatgccccaagcctctgagccgggtgtcaatcatggccggatctctgacaggactgctgctgcttcaggccgtgtcttgggcttctggcgctagaccttgcatccccaagagcttcggctacagcagcgtcgtgtgcgtgtgcaatgccacctactgcgacagcttcgaccctcctacctttcctgctctgggcaccttcagcagatacgagagcaccagatccggcagacggatggaactgagcatgggacccatccaggccaatcacacaggcactggcctgctgctgacactgcagcctgagcagaaattccagaaagtgaaaggcttcggcggagccatgacagatgccgccgctctgaatatcctggctctgtctccaccagctcagaacctgctgctcaagagctacttcagcgaggaaggcatcggctacaacatcatcagagtgcccatggccagctgcgacttcagcatcaggacctacacctacgccgacacacccgacgatttccagctgcacaacttcagcctgcctgaagaggacaccaagctgaagatccctctgatccacagagccctgcagctggcacaaagacccgtgtcactgctggcctctccatggacatctcccacctggctgaaaacaaatggcgccgtgaatggcaagggcagcctgaaaggccaacctggcgacatctaccaccagacctgggccagatacttcgtgaagttcctggacgcctatgccgagcacaagctgcagttttgggccgtgacagccgagaacgaaccttctgctggactgctgagcggctacccctttcagtgcctgggctttacacccgagcaccagcgggactttatcgcccgtgatctgggacccacactggccaatagcacccaccataatgtgcggctgctgatgctggacgaccagagactgcttctgccccactgggctaaagtggtgctgacagatcctgaggccgccaaatacgtgcacggaatcgccgtgcactggtatctggactttctggcccctgccaaggccacactgggagagacacacagactgttccccaacaccatgctgttcgccagcgaagcctgtgtgggcagcaagttttgggaacagagcgtgcggctcggcagctgggatagaggcatgcagtacagccacagcatcatcaccaacctgctgtaccacgtcgtcggctggaccgactggaatctggccctgaatcctgaaggcggccctaactgggtccgaaacttcgtggacagccccatcatcgtggacatcaccaaggacaccttctacaagcagcccatgttctaccacctgggacacttcagcaagttcatccccgagggctctcagcgcgttggactggtggcttcccagaagaacgatctggacgccgtggctctgatgcaccctgatggatctgctgtggtggtggtcctgaaccgcagcagcaaagatgtgcccctgaccatcaaggatcccgccgtgggattcctggaaacaatcagccctggctactccatccacacctacctgtggcgtagacagaagtttgaaagacagcagaaaatcctggatcagagattcttcgagtagtaactcgaggacggggtgaactacgcctgaggatccgatctttttccctctgccaaaaattatggggacatcatgaagccccttgagcatctgacttctggctaataaaggaaatttattttcattgcaatagtgtgttggaattttttgtgtctctcactcggcctaggtagataagtagcatggcgggttaatcattaactacaaggaacccctagtgatggagttggccactccctctctgcgcgctcgctcgctcactgaggccgggcgaccaaaggtcgcccgacgcccgggctttgcccgggcggcctcagtgagcgagcgagcgcgcag

SEQ ID NO: 1772 - DNA, 1608 bp, Artificial Sequence
  source: /note="Description of Artificial Sequence: Synthetic polynucleotide"
atggaattctctagcccatctagagaggaatgtcctaagcctctgtcaagagtgtccatcatggccggcagcctgacaggcctgctgctgctgcaggccgtgtcctgggccagtggagcccggccctgcatccctaagtccttcggctattctagcgtggtctgcgtgtgtaatgccacttactgcgacagcttcgaccctcctaccttccccgcccttggaacattcagcagatacgagagcaccagaagcggcagaagaatggaactgagcatgggcccaatccaggccaaccacaccggcaccggcctgctgctgacactgcaacctgagcagaagttccagaaggtgaagggatttggaggcgccatgaccgacgctgctgctctgaacatcctggccctctccccacctgctcagaacctgctgcttaaaagctacttcagcgaggaaggcatcggctataacatcatcagagtgcccatggccagctgcgacttcagcatcagaacatacacctacgccgatacacctgatgacttccaactgcacaacttcagcctgcctgaagaggacacaaagctgaaaatccccctgatccaccgggccctgcagctggcccagagacctgtgagcctgctggcctctccttggacaagccccacctggctgaagaccaatggagctgtgaacggcaagggcagcctgaagggccagcccggcgacatctaccaccaaacctgggctcgctacttcgtgaaattcctggacgcctacgctgagcataagctgcaattttgggccgttacagccgagaacgagccttctgccggcctgctgtctggatatcctttccagtgcctgggcttcacccctgagcaccagagagactttatcgccagagatctggggcctaccctggctaacagcacacaccacaacgtgcggctgctgatgctggacgatcagaggctgctgctcccccactgggccaaggtggtgctgacagatccggaggccgccaaatacgtgcacggcatcgccgtccactggtacctggatttcctggcccctgccaaggccaccctgggcgagacacatagactgtttcctaataccatgctgttcgccagcgaggcctgcgtgggcagcaagttctgggaacagagcgtgcggctgggcagctgggacagaggaatgcagtacagccacagcatcattaccaacctgctgtaccacgtggtgggctggaccgactggaacctggccctgaaccccgaaggcggccccaactgggtgcggaacttcgtggactctcctatcatcgtggatattaccaaggataccttttacaagcagcctatgttctaccacctgggccacttcagcaagttcatccctgagggctctcagcgggtgggcctggtggcctctcagaaaaacgacctggatgccgttgccctgatgcaccccgacggcagcgccgtggtggtcgtcctgaatagaagctccaaggacgtgcctctgaccatcaaggaccccgctgtgggatttctggaaaccatcagccctggctacagcatccacacctacctgtggcggcggcag

SEQ ID NO: 1773 - DNA, 1491 bp, Artificial Sequence
  source: /note="Description of Artificial Sequence: Synthetic polynucleotide"
gcccggccctgcatccctaagtccttcggctattctagcgtggtctgcgtgtgtaatgccacttactgcgacagcttcgaccctcctaccttccccgcccttggaacattcagcagatacgagagcaccagaagcggcagaagaatggaactgagcatgggcccaatccaggccaaccacaccggcaccggcctgctgctgacactgcaacctgagcagaagttccagaaggtgaagggatttggaggcgccatgaccgacgctgctgctctgaacatcctggccctctccccacctgctcagaacctgctgcttaaaagctacttcagcgaggaaggcatcggctataacatcatcagagtgcccatggccagctgcgacttcagcatcagaacatacacctacgccgatacacctgatgacttccaactgcacaacttcagcctgcctgaagaggacacaaagctgaaaatccccctgatccaccgggccctgcagctggcccagagacctgtgagcctgctggcctctccttggacaagccccacctggctgaagaccaatggagctgtgaacggcaagggcagcctgaagggccagcccggcgacatctaccaccaaacctgggctcgctacttcgtgaaattcctggacgcctacgctgagcataagctgcaattttgggccgttacagccgagaacgagccttctgccggcctgctgtctggatatcctttccagtgcctgggcttcacccctgagcaccagagagactttatcgccagagatctggggcctaccctggctaacagcacacaccacaacgtgcggctgctgatgctggacgatcagaggctgctgctcccccactgggccaaggtggtgctgacagatccggaggccgccaaatacgtgcacggcatcgccgtccactggtacctggatttcctggcccctgccaaggccaccctgggcgagacacatagactgtttcctaataccatgctgttcgccagcgaggcctgcgtgggcagcaagttctgggaacagagcgtgcggctgggcagctgggacagaggaatgcagtacagccacagcatcattaccaacctgctgtaccacgtggtgggctggaccgactggaacctggccctgaaccccgaaggcggccccaactgggtgcggaacttcgtggactctcctatcatcgtggatattaccaaggataccttttacaagcagcctatgttctaccacctgggccacttcagcaagttcatccctgagggctctcagcgggtgggcctggtggcctctcagaaaaacgacctggatgccgttgccctgatgcaccccgacggcagcgccgtggtggtcgtcctgaatagaagctccaaggacgtgcctctgaccatcaaggaccccgctgtgggatttctggaaaccatcagccctggctacagcatccacacctacctgtggcggcggcag

SEQ ID NO: 1774 - protein, 536 aa, Artificial Sequence; identical to SEQ ID NO: 1740
  source: /note="Description of Artificial Sequence: Synthetic polypeptide"

SEQ ID NO: 1775 - protein, 497 aa, Artificial Sequence
  source: /note="Description of Artificial Sequence: Synthetic polypeptide"
ARPCIPKSFGYSSVVCVCNATYCDSFDPPTFPALGTFSRYESTRSGRRMELSMGPIQANHTGTGLLLTLQPEQKFQKVKGFGGAMTDAAALNILALSPPAQNLLLKSYFSEEGIGYNIIRVPMASCDFSIRTYTYADTPDDFQLHNFSLPEEDTKLKIPLIHRALQLAQRPVSLLASPWTSPTWLKTNGAVNGKGSLKGQPGDIYHQTWARYFVKFLDAYAEHKLQFWAVTAENEPSAGLLSGYPFQCLGFTPEHQRDFIARDLGPTLANSTHHNVRLLMLDDQRLLLPHWAKVVLTDPEAAKYVHGIAVHWYLDFLAPAKATLGETHRLFPNTMLFASEACVGSKFWEQSVRLGSWDRGMQYSHSIITNLLYHVVGWTDWNLALNPEGGPNWVRNFVDSPIIVDITKDTFYKQPMFYHLGHFSKFIPEGSQRVGLVASQKNDLDAVALMHPDGSAVVVVLNRSSKDVPLTIKDPAVGFLETISPGYSIHTYLWRRQ

SEQ ID NO: 1776 - DNA, 1608 bp, Artificial Sequence
  source: /note="Description of Artificial Sequence: Synthetic polynucleotide"
atggagttttcaagtccttccagagaggaatgtcccaagcctttgagtagggtaagcatcatggctggcagcctcacaggattgcttctacttcaggcagtgtcgtgggcatcaggtgcccgcccctgcatccctaaaagcttcggctacagctcggtggtgtgtgtctgcaatgccacatactgtgactcctttgaccccccgacctttcctgcccttggtaccttcagccgctatgagagtacacgcagtgggcgacggatggagctgagtatggggcccatccaggctaatcacacgggcacaggcctgctactgaccctgcagccagaacagaagttccagaaagtgaagggatttggaggggccatgacagatgctgctgctctcaacatccttgccctgtcaccccctgcccaaaatttgctacttaaatcgtacttctctgaagaaggaatcggatataacatcatccgggtacccatggccagctgtgacttctccatccgcacctacacctatgcagacacccctgatgatttccagttgcacaacttcagcctcccagaggaagataccaagctcaagatacccctgattcaccgagccctgcagttggcccagcgtcccgtttcactccttgccagcccctggacatcacccacttggctcaagaccaatggagcggtgaatgggaaggggtcactcaagggacagcccggagacatctaccaccagacctgggccagatactttgtgaagttcctggatgcctatgctgagcacaagttacagttctgggcagtgacagctgaaaatgagccttctgctgggctgttgagtggataccccttccagtgcctgggcttcacccctgaacatcagcgagacttcattgcccgtgacctaggtcctaccctcgccaacagtactcaccacaatgtccgcctactcatgctggatgaccaacgcttgctgctgccccactgggcaaaggtggtactgacagacccagaagcagctaaatatgttcatggcattgctgtacattggtacctggactttctggctccagccaaagccaccctaggggagacacaccgcctgttccccaacaccatgctctttgcctcagaggcctgtgtgggctccaagttctgggagcagagtgtgcggctaggctcctgggatcgagggatgcagtacagccacagcatcatcacgaacctcctgtaccatgtggtcggctggaccgactggaaccttgccctgaaccccgaaggaggacccaattgggtgcgtaactttgtcgacagtcccatcattgtagacatcaccaaggacacgttttacaaacagcccatgttctaccaccttggccacttcagcaagttcattcctgagggctcccagagagtggggctggttgccagtcagaagaacgacctggacgcagtggcactgatgcatcccgatggctctgctgttgtggtcgtgctaaaccgctcctctaaggatgtgcctcttaccatcaaggatcctgctgtgggcttcctggagacaatctcacctggctactccattcacacctacctgtggcgtcgccag

SEQ ID NO: 1777 - DNA, 1491 bp, Artificial Sequence
  source: /note="Description of Artificial Sequence: Synthetic polynucleotide"
gcccgcccctgcatccctaaaagcttcggctacagctcggtggtgtgtgtctgcaatgccacatactgtgactcctttgaccccccgacctttcctgcccttggtaccttcagccgctatgagagtacacgcagtgggcgacggatggagctgagtatggggcccatccaggctaatcacacgggcacaggcctgctactgaccctgcagccagaacagaagttccagaaagtgaagggatttggaggggccatgacagatgctgctgctctcaacatccttgccctgtcaccccctgcccaaaatttgctacttaaatcgtacttctctgaagaaggaatcggatataacatcatccgggtacccatggccagctgtgacttctccatccgcacctacacctatgcagacacccctgatgatttccagttgcacaacttcagcctcccagaggaagataccaagctcaagatacccctgattcaccgagccctgcagttggcccagcgtcccgtttcactccttgccagcccctggacatcacccacttggctcaagaccaatggagcggtgaatgggaaggggtcactcaagggacagcccggagacatctaccaccagacctgggccagatactttgtgaagttcctggatgcctatgctgagcacaagttacagttctgggcagtgacagctgaaaatgagccttctgctgggctgttgagtggataccccttccagtgcctgggcttcacccctgaacatcagcgagacttcattgcccgtgacctaggtcctaccctcgccaacagtactcaccacaatgtccgcctactcatgctggatgaccaacgcttgctgctgccccactgggcaaaggtggtactgacagacccagaagcagctaaatatgttcatggcattgctgtacattggtacctggactttctggctccagccaaagccaccctaggggagacacaccgcctgttccccaacaccatgctctttgcctcagaggcctgtgtgggctccaagttctgggagcagagtgtgcggctaggctcctgggatcgagggatgcagtacagccacagcatcatcacgaacctcctgtaccatgtggtcggctggaccgactggaaccttgccctgaaccccgaaggaggacccaattgggtgcgtaactttgtcgacagtcccatcattgtagacatcaccaaggacacgttttacaaacagcccatgttctaccaccttggccacttcagcaagttcattcctgagggctcccagagagtggggctggttgccagtcagaagaacgacctggacgcagtggcactgatgcatcccgatggctctgctgttgtggtcgtgctaaaccgctcctctaaggatgtgcctcttaccatcaaggatcctgctgtgggcttcctggagacaatctcacctggctactccattcacacctacctgtggcgtcgccag

SEQ ID NO: 1778 - protein, 536 aa, Artificial Sequence; identical to SEQ ID NO: 1740
  source: /note="Description of Artificial Sequence: Synthetic polypeptide"

SEQ ID NO: 1779 - protein, 497 aa, Artificial Sequence; identical to SEQ ID NO: 1775
  source: /note="Description of Artificial Sequence: Synthetic polypeptide"

SEQ ID NO: 1780 - DNA, 1608 bp, Artificial Sequence
  source: /note="Description of Artificial Sequence: Synthetic polynucleotide"
atggaattcagcagccccagcagagaggaatgccccaagcctctgagccgggtgtcaatcatggccggatctctgacaggactgctgctgcttcaggccgtgtcttgggcttctggcgctagaccttgcatccccaagagcttcggctacagcagcgtcgtgtgcgtgtgcaatgccacctactgcgacagcttcgaccctcctacctttcctgctctgggcaccttcagcagatacgagagcaccagatccggcagacggatggaactgagcatgggacccatccaggccaatcacacaggcactggcctgctgctgacactgcagcctgagcagaaattccagaaagtgaaaggcttcggcggagccatgacagatgccgccgctctgaatatcctggctctgtctccaccagctcagaacctgctgctcaagagctacttcagcgaggaaggcatcggctacaacatcatcagagtgcccatggccagctgcgacttcagcatcaggacctacacctacgccgacacacccgacgatttccagctgcacaacttcagcctgcctgaagaggacaccaagctgaagatccctctgatccacagagccctgcagctggcacaaagacccgtgtcactgctggcctctccatggacatctcccacctggctgaaaacaaatggcgccgtgaatggcaagggcagcctgaaaggccaacctggcgacatctaccaccagacctgggccagatacttcgtgaagttcctggacgcctatgccgagcacaagctgcagttttgggccgtgacagccgagaacgaaccttctgctggactgctgagcggctacccctttcagtgcctgggctttacacccgagcaccagcgggactttatcgcccgtgatctgggacccacactggccaatagcacccaccataatgtgcggctgctgatgctggacgaccagagactgcttctgccccactgggctaaagtggtgctgacagatcctgaggccgccaaatacgtgcacggaatcgccgtgcactggtatctggactttctggcccctgccaaggccacactgggagagacacacagactgttccccaacaccatgctgttcgccagcgaagcctgtgtgggcagcaagttttgggaacagagcgtgcggctcggcagctgggatagaggcatgcagtacagccacagcatcatcaccaacctgctgtaccacgtcgtcggctggaccgactggaatctggccctgaatcctgaaggcggccctaactgggtccgaaacttcgtggacagccccatcatcgtggacatcaccaaggacaccttctacaagcagcccatgttctaccacctgggacacttcagcaagttcatccccgagggctctcagcgcgttggactggtggcttcccagaagaacgatctggacgccgtggctctgatgcaccctgatggatctgctgtggtggtggtcctgaaccgcagcagcaaagatgtgcccctgaccatcaaggatcccgccgtgggattcctggaaacaatcagccctggctactccatccacacctacctgtggcgtagacag

SEQ ID NO: 1781 - DNA, 1491 bp, Artificial Sequence
  source: /note="Description of Artificial Sequence: Synthetic polynucleotide"
gctagaccttgcatccccaagagcttcggctacagcagcgtcgtgtgcgtgtgcaatgccacctactgcgacagcttcgaccctcctacctttcctgctctgggcaccttcagcagatacgagagcaccagatccggcagacggatggaactgagcatgggacccatccaggccaatcacacaggcactggcctgctgctgacactgcagcctgagcagaaattccagaaagtgaaaggcttcggcggagccatgacagatgccgccgctctgaatatcctggctctgtctccaccagctcagaacctgctgctcaagagctacttcagcgaggaaggcatcggctacaacatcatcagagtgcccatggccagctgcgacttcagcatcaggacctacacctacgccgacacacccgacgatttccagctgcacaacttcagcctgcctgaagaggacaccaagctgaagatccctctgatccacagagccctgcagctggcacaaagacccgtgtcactgctggcctctccatggacatctcccacctggctgaaaacaaatggcgccgtgaatggcaagggcagcctgaaaggccaacctggcgacatctaccaccagacctgggccagatacttcgtgaagttcctggacgcctatgccgagcacaagctgcagttttgggccgtgacagccgagaacgaaccttctgctggactgctgagcggctacccctttcagtgcctgggctttacacccgagcaccagcgggactttatcgcccgtgatctgggacccacactggccaatagcacccaccataatgtgcggctgctgatgctggacgaccagagactgcttctgccccactgggctaaagtggtgctgacagatcctgaggccgccaaatacgtgcacggaatcgccgtgcactggtatctggactttctggcccctgccaaggccacactgggagagacacacagactgttccccaacaccatgctgttcgccagcgaagcctgtgtgggcagcaagttttgggaacagagcgtgcggctcggcagctgggatagaggcatgcagtacagccacagcatcatcaccaacctgctgtaccacgtcgtcggctggaccgactggaatctggccctgaatcctgaaggcggccctaactgggtccgaaacttcgtggacagccccatcatcgtggacatcaccaaggacaccttctacaagcagcccatgttctaccacctgggacacttcagcaagttcatccccgagggctctcagcgcgttggactggtggcttcccagaagaacgatctggacgccgtggctctgatgcaccctgatggatctgctgtggtggtggtcctgaaccgcagcagcaaagatgtgcccctgaccatcaaggatcccgccgtgggattcctggaaacaatcagccctggctactccatccacacctacctgtggcgtagacag

SEQ ID NO: 1782 - protein, 536 aa, Artificial Sequence; identical to SEQ ID NO: 1740
  source: /note="Description of Artificial Sequence: Synthetic polypeptide"

SEQ ID NO: 1783 - protein, 497 aa, Artificial Sequence; identical to SEQ ID NO: 1775
  source: /note="Description of Artificial Sequence: Synthetic polypeptide"

SEQ ID NO: 1784 - protein, 82 aa, Homo sapiens
DGGFCEVCKKLVGYLDRNLEKNSTKQEILAALEKGCSFLPDPYQKQCDQFVAEYEPVLIEILVEVMDPSFVCLKIGACPSAH

SEQ ID NO: 1785 - protein, 508 aa, Homo sapiens
GPVLGLKECTRGSAVWCQNVKTASDCGAVKHCLQTVWNKPTVKSLPCDICKDVVTAAGDMLKDNATEEEILVYLEKTCDWLPKPNMSASCKEIVDSYLPVILDIIKGEMSRPGEVCSALNLCESLQKHLAELNHQKQLESNKIPELDMTEVVAPFMANIPLLLYPQDGPRSKPQPKDNGDVCQDCIQMVTDIQTAVRTNSTFVQALVEHVKEECDRLGPGMADICKNYISQYSEIAIQMMMHMQPKEICALVGFCDEVKEMPMQTLVPAKVASKNVIPALELVEPIKKHEVPAKSDVYCEVCEFLVKEVTKLIDNNKTEKEILDAFDKMCSKLPKSLSEECQEVVDTYGSSILSILLEEVSPELVCSMLHLCSGTRLPALTVHVTQPKDGGFCEVCKKLVGYLDRNLEKNSTKQEILAALEKGCSFLPDPYQKQCDQFVAEYEPVLIEILVEVMDPSFVCLKIGACPSAHKPLLGTEKCIWGPSYWCQNTETAAQCNAVEHCKRHVWN

SEQ ID NO: 1786 - DNA, 399 bp, Homo sapiens
atgtacgccctcttcctcctggccagcctcctgggcgcggctctagccgtgaaagagatgcccatgcagactctggtccccgccaaagtggcctccaagaatgtcatccctgccctggaactggtggagcccattaagaagcacgaggtcccagcaaagtctgatgtttactgtgaggtgtgtgaattcctggtgaaggaggtgaccaagctgattgacaacaacaagactgagaaagaaatactcgacgcttttgacaaaatgtgctcgaagctgccgaagtccctgtcggaagagtgccaggaggtggtggacacgtacggcagctccatcctgtccatcctgctggaggaggtcagccctgagctggtgtgcagcatgctgcacctctgctctggc

SEQ ID NO: 1787 - DNA, 351 bp, Homo sapiens
gtgaaagagatgcccatgcagactctggtccccgccaaagtggcctccaagaatgtcatccctgccctggaactggtggagcccattaagaagcacgaggtcccagcaaagtctgatgtttactgtgaggtgtgtgaattcctggtgaaggaggtgaccaagctgattgacaacaacaagactgagaaagaaatactcgacgcttttgacaaaatgtgctcgaagctgccgaagtccctgtcggaagagtgccaggaggtggtggacacgtacggcagctccatcctgtccatcctgctggaggaggtcagccctgagctggtgtgcagcatgctgcacctctgctctggc

SEQ ID NO: 1788 - protein, 133 aa, Homo sapiens
MYALFLLASLLGAALAVKEMPMQTLVPAKVASKNVIPALELVEPIKKHEVPAKSDVYCEVCEFLVKEVTKLIDNNKTEKEILDAFDKMCSKLPKSLSEECQEVVDTYGSSILSILLEEVSPELVCSMLHLCSG

SEQ ID NO: 1789 - protein, 117 aa, Homo sapiens
VKEMPMQTLVPAKVASKNVIPALELVEPIKKHEVPAKSDVYCEVCEFLVKEVTKLIDNNKTEKEILDAFDKMCSKLPKSLSEECQEVVDTYGSSILSILLEEVSPELVCSMLHLCSG

SEQ ID NO: 1790 - DNA, 288 bp, Homo sapiens
atgtacgccctcttcctcctggccagcctcctgggcgcggctctagcctctgatgtttactgtgaggtgtgtgaattcctggtgaaggaggtgaccaagctgattgacaacaacaagactgagaaagaaatactcgacgcttttgacaaaatgtgctcgaagctgccgaagtccctgtcggaagagtgccaggaggtggtggacacgtacggcagctccatcctgtccatcctgctggaggaggtcagccctgagctggtgtgcagcatgctgcacctctgctctggc

SEQ ID NO: 1791 - DNA, 240 bp, Homo sapiens
tctgatgtttactgtgaggtgtgtgaattcctggtgaaggaggtgaccaagctgattgacaacaacaagactgagaaagaaatactcgacgcttttgacaaaatgtgctcgaagctgccgaagtccctgtcggaagagtgccaggaggtggtggacacgtacggcagctccatcctgtccatcctgctggaggaggtcagccctgagctggtgtgcagcatgctgcacctctgctctggc

SEQ ID NO: 1792 - protein, 96 aa, Homo sapiens
MYALFLLASLLGAALASDVYCEVCEFLVKEVTKLIDNNKTEKEILDAFDKMCSKLPKSLSEECQEVVDTYGSSILSILLEEVSPELVCSMLHLCSG

SEQ ID NO: 1793 - DNA, 42 bp, Human immunodeficiency virus
tatggcaggaaaaagcggaggcaaaggcgccgccccccccag

SEQ ID NO: 1794 - protein, 14 aa, Human immunodeficiency virus
YGRKKRRQRRRPPQ

SEQ ID NO: 1795 - DNA, 102 bp, Artificial Sequence
  source: /note="Description of Artificial Sequence: Synthetic polynucleotide"
tccgtaatcgacgccttacagtataagctggagggaaccaccagattgacaaggaaacgagggcttaagcttgctactgcactatccctgagcaataaattt

SEQ ID NO: 1796 - protein, 34 aa, Artificial Sequence
  source: /note="Description of Artificial Sequence: Synthetic polypeptide"
SVIDALQYKLEGTTRLTRKRGLKLATALSLSNKF

SEQ ID NO: 1797 - DNA, 54 bp, Artificial Sequence
  source: /note="Description of Artificial Sequence: Synthetic oligonucleotide"
ctacggaagctgcggaagcggctactgctgcggaaacttcggaaacggctactg

SEQ ID NO: 1798 - protein, 18 aa, Artificial Sequence
  source: /note="Description of Artificial Sequence: Synthetic peptide"
LRKLRKRLLLRKLRKRLL

SEQ ID NO: 1799 - DNA, 15 bp, Artificial Sequence
  source: /note="Description of Artificial Sequence: Synthetic oligonucleotide"
aagtttgaaagacag

SEQ ID NO: 1800 - protein, 5 aa, Artificial Sequence
  source: /note="Description of Artificial Sequence: Synthetic peptide"
KFERQ

SEQ ID NO: 1801 - DNA, 63 bp, Artificial Sequence
  source: /note="Description of Artificial Sequence: Synthetic oligonucleotide"
atgaaggagaccgctgctgcaaagttcgagagacagcatatggatagctccacaagcgccgca

SEQ ID NO: 1802 - protein, 21 aa, Artificial Sequence
  source: /note="Description of Artificial Sequence: Synthetic peptide"
MKETAAAKFERQHMDSSTSAA

SEQ ID NO: 1803 - DNA, 15 bp, Artificial Sequence
  source: /note="Description of Artificial Sequence: Synthetic oligonucleotide"
cagaaaatcctggat

SEQ ID NO: 1804 - protein, 5 aa, Artificial Sequence
  source: /note="Description of Artificial Sequence: Synthetic peptide"
QKILD

SEQ ID NO: 1805 - DNA, 15 bp, Artificial Sequence
  source: /note="Description of Artificial Sequence: Synthetic oligonucleotide"
cagagattcttcgag

SEQ ID NO: 1806 - protein, 5 aa, Artificial Sequence
  source: /note="Description of Artificial Sequence: Synthetic peptide"
QRFFE

SEQ ID NO: 1807 - DNA, 45 bp, Artificial Sequence
  source: /note="Description of Artificial Sequence: Synthetic oligonucleotide"
aagtttgaaagacagcagaaaatcctggatcagagattcttcgag

SEQ ID NO: 1808 - protein, 15 aa, Artificial Sequence
  source: /note="Description of Artificial Sequence: Synthetic peptide"
KFERQQKILDQRFFE

SEQ ID NO: 1809 - DNA, 3941 bp, Artificial Sequence
  source: /note="Description of Artificial Sequence: Synthetic polynucleotide"
ctgcgcgctcgctcgctcactgaggccgcccgggcaaagcccgggcgtcgggcgacctttggtcgcccggcctcagtgagcgagcgagcgcgcagagagggagtggccaactccatcactaggggttccttgtagttaatgattaacccgccatgctacttatctaccagggtaatggggatcctctagaactatagctagtcgacattgattattgactagttattaatagtaatcaattacggggtcattagttcatagcccatatatggagttccgcgttacataacttacggtaaatggcccgcctggctgaccgcccaacgacccccgcccattgacgtcaataatgacgtatgttcccatagtaacgccaatagggactttccattgacgtcaatgggtggagtatttacggtaaactgcccacttggcagtacatcaagtgtatcatatgccaagtacgccccctattgacgtcaatgacggtaaatggcccgcctggcattatgcccagtacatgaccttatgggactttcctacttggcagtacatctacgtattagtcatcgctattaccatgtcgaggccacgttctgcttcactctccccatctcccccccctccccacccccaattttgtatttatttattttttaattattttgtgcagcgatgggggcggggggggggggcgcgcgccaggcggggcggggcggggcgaggggcggggcggggcgaggcggagaggtgcggcggcagccaatcagagcggcgcgctccgaaagtttccttttatggcgaggcggcggcggcggcggccctataaaaagcgaagcgcgcggcgggcgggagcaagcttcgtttagtgaaccgtcagatcgcctggagacgccatccacgctgttttgacctccatagaagacaccgggaccgatccagcctccgcggattcgaatcccggccgggaacggtgcattggaacgcggattccccgtgccaagagtgacgtaagtaccgcctatagagtctataggcccacaaaaaatgctttcttcttttaatatacttttttgtttatcttatttctaatactttccctaatctctttctttcagggcaataatgatacaatgtatcatgcctctttgcaccattctaaagaataacagtgataatttctgggttaaggcaatagcaatatttctgcatataaatatttctgcatataaattgtaactgatgtaagaggtttcatattgctaatagcagctacaatccagctaccattctgcttttattttatggttgggataaggctggattattctgagtccaagctaggcccttttgctaatcatgttcatacctcttatcttcctcccacagctcctgggcaacgtgctggtctgtgtgctggcccatcactttggcaaagaattgggattcgaaccggtgccgccaccatggaattcagcagccccagcagagaggaatgccccaagcctctgagccgggtgtcaatcatggccggatctctgacaggactgctgctgcttcaggccgtgtcttgggcttctggcatgaaggagaccgctgctgcaaagttcgagagacagcatatggatagctccacaagcgccgcagctagaccttgcatccccaagagcttcggctacagcagcgtcgtgtgcgtgtgcaatgccacctactgcgacagcttcgaccctcctacctttcctgctctgggcaccttcagcagatacgagagcaccagatccggcagacggatggaactgagcatgggacccatccaggccaatcacacaggcactggcctgctgctgacactgcagcctgagcagaaattccagaaagtgaaaggcttcggcggagccatgacagatgccgccgctctgaatatcctggctctgtctccaccagctcagaacctgctgctcaagagctacttcagcgaggaaggcatcggctacaacatcatcagagtgcccatggccagctgcgacttcagcatcaggacctacacctacgccgacacacccgacgatttccagctgcacaacttcagcctgcctgaagaggacaccaagctgaagatccctctgatccacagagccctgcagctggcacaaagacccgtgtcactgctggcctctccatggacatctcccacctggctgaaaacaaatggcgccgtgaatggcaagggcagcctgaaaggccaacctggcgacatctaccaccagacctgggccagatacttcgtgaagttcctggacgcctatgccgagcacaagctgcagttttgggccgtgacagccgagaacgaaccttctgctggactgctgagcggctacccctttcagtgcctgggctttacacccgagcaccagcgggactttatcgcccgtgatctgggacccacactggccaatagcacccaccataatgtgcggctgctgatgctggacgaccagagactgcttctgccccactgggctaaagtggtgctgacagatcctgaggccgccaaatacgtgcacggaatcgccgtgcactggtatctggactttctggcccctgccaaggccacactgggagagacacacagactgttccccaacaccatgctgttcgccagcgaagcctgtgtgggcagcaagttttgggaacagagcgtgcggctcggcagctgggatagaggcatgcagtacagccacagcatcatcaccaacctgctgtaccacgtcgtcggctggaccgactggaatctggccctgaatcctgaaggcggccctaactgggtccgaaacttcgtggacagccccatcatcgtggacatcaccaaggacaccttctacaagcagcccatgttctaccacctgggacacttcagcaagttcatccccgagggctctcagcgcgttggactggtggcttcccagaagaacgatctggacgccgtggctctgatgcaccctgatggatctgctgtggtggtggtcctgaaccgcagcagcaaagatgtgcccctgaccatcaaggatcccgccgtgggattcctggaaacaatcagccctggctactccatccacacctacctgtggcgtagacagagaaagaggcgagagggcagaggaagtcttctaacatgcggtgacgtggaggagaatcccggccctatgtacgccctcttcctcctggccagcctcctgggcgcggctctagccgtgaaagagatgcccatgcagactctggtccccgccaaagtggcctccaagaatgtcatccctgccctggaactggtggagcccattaagaagcacgaggtcccagcaaagtctgatgtttactgtgaggtgtgtgaattcctggtgaaggaggtgaccaagctgattgacaacaacaagactgagaaagaaatactcgacgcttttgacaaaatgtgctcgaagctgccgaagtccctgtcggaagagtgccaggaggtggtggacacgtacggcagctccatcctgtccatcctgctggaggaggtcagccctgagctggtgtgcagcatgctgcacctctgctctggctagtaactcgaggacggggtgaactacgcctgaggatccgatctttttccctctgccaaaaattatggggacatcatgaagccccttgagcatctgacttctggctaataaaggaaatttattttcattgcaatagtgtgttggaattttttgtgtctctcactcggcctaggtagataagtagcatggcgggttaatcattaactacaaggaacccctagtgatggagttggccactccctctctgcgcgctcgctcgctcactgaggccgggcgaccaaaggtcgcccgacgcccgggctttgcccgggcggcctcagtgagcgagcgagcgcgcag

SEQ ID NO: 1810 - DNA, 3977 bp, Artificial Sequence
  source: /note="Description of Artificial Sequence: Synthetic polynucleotide"
ctgcgcgctcgctcgctcactgaggccgcccgggcaaagcccgggcgtcgggcgacctttggtcgcccggcctcagtgagcgagcgagcgcgcagagagggagtggccaactccatcactaggggttccttgtagttaatgattaacccgccatgctacttatctaccagggtaatggggatcctctagaactatagctagtcgacattgattattgactagttattaatagtaatcaattacggggtcattagttcatagcccatatatggagttccgcgttacataacttacggtaaatggcccgcctggctgaccgcccaacgacccccgcccattgacgtcaataatgacgtatgttcccatagtaacgccaatagggactttccattgacgtcaatgggtggagtatttacggtaaactgcccacttggcagtacatcaagtgtatcatatgccaagtacgccccctattgacgtcaatgacggtaaatggcccgcctggcattatgcccagtacatgaccttatgggactttcctacttggcagtacatctacgtattagtcatcgctattaccatgtcgaggccacgttctgcttcactctccccatctcccccccctccccacccccaattttgtatttatttattttttaattattttgtgcagcgatgggggcggggggggggggcgcgcgccaggcggggcggggcggggcgaggggcggggcggggcgaggcggagaggtgcggcggcagccaatcagagcggcgcgctccgaaagtttccttttatggcgaggcggcggcggcggcggccctataaaaagcgaagcgcgcggcgggcgggagcaagcttcgtttagtgaaccgtcagatcgcctggagacgccatccacgctgttttgacctccatagaagacaccgggaccgatccagcctccgcggattcgaatcccggccgggaacggtgcattggaacgcggattccccgtgccaagagtgacgtaagtaccgcctatagagtctataggcccacaaaaaatgctttcttcttttaatatacttttttgtttatcttatttctaatactttccctaatctctttctttcagggcaataatgatacaatgtatcatgcctctttgcaccattctaaagaataacagtgataatttctgggttaaggcaatagcaatatttctgcatataaatatttctgcatataaattgtaactgatgtaagaggtttcatattgctaatagcagctacaatccagctaccattctgcttttattttatggttgggataaggctggattattctgagtccaagctaggcccttttgctaatcatgttcatacctcttatcttcctcccacagctcctgggcaacgtgctggtctgtgtgctggcccatcactttggcaaagaattgggattcgaaccggtgccgccaccatggaattcagcagccccagcagagaggaatgccccaagcctctgagccgggtgtcaatcatggccggatctctgacaggactgctgctgcttcaggccgtgtcttgggcttctggcgctagaccttgcatccccaagagcttcggctacagcagcgtcgtgtgcgtgtgcaatgccacctactgcgacagcttcgaccctcctacctttcctgctctgggcaccttcagcagatacgagagcaccagatccggcagacggatggaactgagcatgggacccatccaggccaatcacacaggcactggcctgctgctgacactgcagcctgagcagaaattccagaaagtgaaaggcttcggcggagccatgacagatgccgccgctctgaatatcctggctctgtctccaccagctcagaacctgctgctcaagagctacttcagcgaggaaggcatcggctacaacatcatcagagtgcccatggccagctgcgacttcagcatcaggacctacacctacgccgacacacccgacgatttccagctgcacaacttcagcctgcctgaagaggacaccaagctgaagatccctctgatccacagagccctgcagctggcacaaagacccgtgtcactgctggcctctccatggacatctcccacctggctgaaaacaaatggcgccgtgaatggcaagggcagcctgaaaggccaacctggcgacatctaccaccagacctgggccagatacttcgtgaagttcctggacgcctatgccgagcacaagctgcagttttgggccgtgacagccgagaacgaaccttctgctggactgctgagcggctacccctttcagtgcctgggctttacacccgagcaccagcgggactttatcgcccgtgatctgggacccacactggccaatagcacccaccataatgtgcggctgctgatgctggacgaccagagactgcttctgccccactgggctaaagtggtgctgacagatcctgaggccgccaaatacgtgcacggaatcgccgtgcactggtatctggactttctggcccctgccaaggccacactgggagagacacacagactgttccccaacaccatgctgttcgccagcgaagcctgtgtgggcagcaagttttgggaacagagcgtgcggctcggcagctgggatagaggcatgcagtacagccacagcatcatcaccaacctgctgtaccacgtcgtcggctggaccgactggaatctggccctgaatcctgaaggcggccctaactgggtccgaaacttcgtggacagccccatcatcgtggacatcaccaaggacaccttctacaagcagcccatgttctaccacctgggacacttcagcaagttcatccccgagggctctcagcgcgttggactggtggcttcccagaagaacgatctggacgccgtggctctgatgcaccctgatggatctgctgtggtggtggtcctgaaccgcagcagcaaagatgtgcccctgaccatcaaggatcccgccgtgggattcctggaaacaatcagccctggctactccatccacacctacctgtggcgtagacagggaggggggggttcgggtggcggcggaagtgggggcggtggttctctacggaagctgcggaagcggctactgctgcggaaacttcggaaacggctactgagaaagaggcgagagggcagaggaagtcttctaacatgcggtgacgtggaggagaatcccggccctatgtacgccctcttcctcctggccagcctcctgggcgcggctctagccgtgaaagagatgcccatgcagactctggtccccgccaaagtggcctccaagaatgtcatccctgccctggaactggtggagcccattaagaagcacgaggtcccagcaaagtctgatgtttactgtgaggtgtgtgaattcctggtgaaggaggtgaccaagctgattgacaacaacaagactgagaaagaaatactcgacgcttttgacaaaatgtgctcgaagctgccgaagtccctgtcggaagagtgccaggaggtggtggacacgtacggcagctccatcctgtccatcctgctggaggaggtcagccctgagctggtgtgcagcatgctgcacctctgctctggctagtaactcgaggacggggtgaactacgcctgaggatccgatctttttccctctgccaaaaattatggggacatcatgaagccccttgagcatctgacttctggctaataaaggaaatttattttcattgcaatagtgtgttggaattttttgtgtctctcactcggcctaggtagataagtagcatggcgggttaatcattaactacaaggaacccctagtgatggagttggccactccctctctgcgcgctcgctcgctcactgaggccgggcgaccaaaggtcgcccgacgcccgggctttgcccgggcggcctcagtgagcgagcgagcgcgcag

SEQ ID NO: 1811 - DNA, 4040 bp, Artificial Sequence
  source: /note="Description of Artificial Sequence: Synthetic polynucleotide"
ctgcgcgctcgctcgctcactgaggccgcccgggcaaagcccgggcgtcgggcgacctttggtcgcccggcctcagtgagcgagcgagcgcgcagagagggagtggccaactccatcactaggggttccttgtagttaatgattaacccgccatgctacttatctaccagggtaatggggatcctctagaactatagctagtcgacattgattattgactagttattaatagtaatcaattacggggtcattagttcatagcccatatatggagttccgcgttacataacttacggtaaatggcccgcctggctgaccgcccaacgacccccgcccattgacgtcaataatgacgtatgttcccatagtaacgccaatagggactttccattgacgtcaatgggtggagtatttacggtaaactgcccacttggcagtacatcaagtgtatcatatgccaagtacgccccctattgacgtcaatgacggtaaatggcccgcctggcattatgcccagtacatgaccttatgggactttcctacttggcagtacatctacgtattagtcatcgctattaccatgtcgaggccacgttctgcttcactctccccatctcccccccctccccacccccaattttgtatttatttattttttaattattttgtgcagcgatgggggcggggggggggggcgcgcgccaggcggggcggggcggggcgaggggcggggcggggcgaggcggagaggtgcggcggcagccaatcagagcggcgcgctccgaaagtttccttttatggcgaggcggcggcggcggcggccctataaaaagcgaagcgcgcggcgggcgggagcaagcttcgtttagtgaaccgtcagatcgcctggagacgccatccacgctgttttgacctccatagaagacaccgggaccgatccagcctccgcggattcgaatcccggccgggaacggtgcattggaacgcggattccccgtgccaagagtgacgtaagtaccgcctatagagtctataggcccacaaaaaatgctttcttcttttaatatacttttttgtttatcttatttctaatactttccctaatctctttctttcagggcaataatgatacaatgtatcatgcctctttgcaccattctaaagaataacagtgataatttctgggttaaggcaatagcaatatttctgcatataaatatttctgcatataaattgtaactgatgtaagaggtttcatattgctaatagcagctacaatccagctaccattctgcttttattttatggttgggataaggctggattattctgagtccaagctaggcccttttgctaatcatgttcatacctcttatcttcctcccacagctcctgggcaacgtgctggtctgtgtgctggcccatcactttggcaaagaattgggattcgaaccggtgccgccaccatggaattcagcagccccagcagagaggaatgccccaagcctctgagccgggtgtcaatcatggccggatctctgacaggactgctgctgcttcaggccgtgtcttgggcttctggcatgaaggagaccgctgctgcaaagttcgagagacagcatatggatagctccacaagcgccgcagctagaccttgcatccccaagagcttcggctacagcagcgtcgtgtgcgtgtgcaatgccacctactgcgacagcttcgaccctcctacctttcctgctctgggcaccttcagcagatacgagagcaccagatccggcagacggatggaactgagcatgggacccatccaggccaatcacacaggcactggcctgctgctgacactgcagcctgagcagaaattccagaaagtgaaaggcttcggcggagccatgacagatgccgccgctctgaatatcctggctctgtctccaccagctcagaacctgctgctcaagagctacttcagcgaggaaggcatcggctacaacatcatcagagtgcccatggccagctgcgacttcagcatcaggacctacacctacgccgacacacccgacgatttccagctgcacaacttcagcctgcctgaagaggacaccaagctgaagatccctctgatccacagagccctgcagctggcacaaagacccgtgtcactgctggcctctccatggacatctcccacctggctgaaaacaaatggcgccgtgaatggcaagggcagcctgaaaggccaacctggcgacatctaccaccagacctgggccagatacttcgtgaagttcctggacgcctatgccgagcacaagctgcagttttgggccgtgacagccgagaacgaaccttctgctggactgctgagcggctacccctttcagtgcctgggctttacacccgagcaccagcgggactttatcgcccgtgatctgggacccacactggccaatagcacccaccataatgtgcggctgctgatgctggacgaccagagactgcttctgccccactgggctaaagtggtgctgacagatcctgaggccgccaaatacgtgcacggaatcgccgtgcactggtatctggactttctggcccctgccaaggccacactgggagagacacacagactgttccccaacaccatgctgttcgccagcgaagcctgtgtgggcagcaagttttgggaacagagcgtgcggctcggcagctgggatagaggcatgcagtacagccacagcatcatcaccaacctgctgtaccacgtcgtcggctggaccgactggaatctggccctgaatcctgaaggcggccctaactgggtccgaaacttcgtggacagccccatcatcgtggacatcaccaaggacaccttctacaagcagcccatgttctaccacctgggacacttcagcaagttcatccccgagggctctcagcgcgttggactggtggcttcccagaagaacgatctggacgccgtggctctgatgcaccctgatggatctgctgtggtggtggtcctgaaccgcagcagcaaagatgtgcccctgaccatcaaggatcccgccgtgggattcctggaaacaatcagccctggctactccatccacacctacctgtggcgtagacagggaggggggggttcgggtggcggcggaagtgggggcggtggttctctacggaagctgcggaagcggctactgctgcggaaacttcggaaacggctactgagaaagaggcgagagggcagaggaagtcttctaacatgcggtgacgtggaggagaatcccggccctatgtacgccctcttcctcctggccagcctcctgggcgcggctctagccgtgaaagagatgcccatgcagactctggtccccgccaaagtggcctccaagaatgtcatccctgccctggaactggtggagcccattaagaagcacgaggtcccagcaaagtctgatgtttactgtgaggtgtgtgaattcctggtgaaggaggtgaccaagctgattgacaacaacaagactgagaaagaaatactcgacgcttttgacaaaatgtgctcgaagctgccgaagtccctgtcggaagagtgccaggaggtggtggacacgtacggcagctccatcctgtccatcctgctggaggaggtcagccctgagctggtgtgcagcatgctgcacctctgctctggctagtaactcgaggacggggtgaactacgcctgaggatccgatctttttccctctgccaaaaattatggggacatcatgaagccccttgagcatctgacttctggctaataaaggaaatttattttcattgcaatagtgtgttggaattttttgtgtctctcactcggcctaggtagataagtagcatggcgggttaatcattaactacaaggaacccctagtgatggagttggccactccctctctgcgcgctcgctcgctcactgaggccgggcgaccaaaggtcgcccgacgcccgggctttgcccgggcggcctcagtgagcgagcgagcgcgcag

SEQ ID NO: 1812 - DNA, 3413 bp, Artificial Sequence
  source: /note="Description of Artificial Sequence: Synthetic polynucleotide"
ctgcgcgctcgctcgctcactgaggccgcccgggcaaagcccgggcgtcgggcgacctttggtcgcccggcctcagtgagcgagcgagcgcgcagagagggagtggccaactccatcactaggggttccttgtagttaatgattaacccgccatgctacttatctaccagggtaatggggatcctctagaactatagctagtcgacattgattattgactagttattaatagtaatcaattacggggtcattagttcatagcccatatatggagttccgcgttacataacttacggtaaatggcccgcctggctgaccgcccaacgacccccgcccattgacgtcaataatgacgtatgttcccatagtaacgccaatagggactttccattgacgtcaatgggtggagtatttacggtaaactgcccacttggcagtacatcaagtgtatcatatgccaagtacgccccctattgacgtcaatgacggtaaatggcccgcctggcattatgcccagtacatgaccttatgggactttcctacttggcagtacatctacgtattagtcatcgctattaccatgtcgaggccacgttctgcttcactctccccatctcccccccctccccacccccaattttgtatttatttattttttaattattttgtgcagcgatgggggcggggggggggggcgcgcgccaggcggggcggggcggggcgaggggcggggcggggcgaggcggagaggtgcggcggcagccaatcagagcggcgcgctccgaaagtttccttttatggcgaggcggcggcggcggcggccctataaaaagcgaagcgcgcggcgggcgggagcaagcttcgtttagtgaaccgtcagatcgcctggagacgccatccacgctgttttgacctccatagaagacaccgggaccgatccagcctccgcggattcgaatcccggccgggaacggtgcattggaacgcggattccccgtgccaagagtgacgtaagtaccgcctatagagtctataggcccacaaaaaatgctttcttcttttaatatacttttttgtttatcttatttctaatactttccctaatctctttctttcagggcaataatgatacaatgtatcatgcctctttgcaccattctaaagaataacagtgataatttctgggttaaggcaatagcaatatttctgcatataaatatttctgcatataaattgtaactgatgtaagaggtttcatattgctaatagcagctacaatccagctaccattctgcttttattttatggttgggataaggctggattattctgagtccaagctaggcccttttgctaatcatgttcatacctcttatcttcctcccacagctcctgggcaacgtgctggtctgtgtgctggcccatcactttggcaaagaattgggattcgaaccggtgccgccaccatggaattctctagcccatctagagaggaatgtcctaagcctctgtcaagagtgtccatcatggccggcagcctgacaggcctgctgctgctgcaggccgtgtcctgggccagtggagcccggccctgcatccctaagtccttcggctattctagcgtggtctgcgtgtgtaatgccacttactgcgacagcttcgaccctcctaccttccccgcccttggaacattcagcagatacgagagcaccagaagcggcagaagaatggaactgagcatgggcccaatccaggccaaccacaccggcaccggcctgctgctgacactgcaacctgagcagaagttccagaaggtgaagggatttggaggcgccatgaccgacgctgctgctctgaacatcctggccctctccccacctgctcagaacctgctgcttaaaagctacttcagcgaggaaggcatcggctataacatcatcagagtgcccatggccagctgcgacttcagcatcagaacatacacctacgccgatacacctgatgacttccaactgcacaacttcagcctgcctgaagaggacacaaagctgaaaatccccctgatccaccgggccctgcagctggcccagagacctgtgagcctgctggcctctccttggacaagccccacctggctgaagaccaatggagctgtgaacggcaagggcagcctgaagggccagcccggcgacatctaccaccaaacctgggctcgctacttcgtgaaattcctggacgcctacgctgagcataagctgcaattttgggccgttacagccgagaacgagccttctgccggcctgctgtctggatatcctttccagtgcctgggcttcacccctgagcaccagagagactttatcgccagagatctggggcctaccctggctaacagcacacaccacaacgtgcggctgctgatgctggacgatcagaggctgctgctcccccactgggccaaggtggtgctgacagatccggaggccgccaaatacgtgcacggcatcgccgtccactggtacctggatttcctggcccctgccaaggccaccctgggcgagacacatagactgtttcctaataccatgctgttcgccagcgaggcctgcgtgggcagcaagttctgggaacagagcgtgcggctgggcagctgggacagaggaatgcagtacagccacagcatcattaccaacctgctgtaccacgtggtgggctggaccgactggaacctggccctgaaccccgaaggcggccccaactgggtgcggaacttcgtggactctcctatcatcgtggatattaccaaggataccttttacaagcagcctatgttctaccacctgggccacttcagcaagttcatccctgagggctctcagcgggtgggcctggtggcctctcagaaaaacgacctggatgccgttgccctgatgcaccccgacggcagcgccgtggtggtcgtcctgaatagaagctccaaggacgtgcctctgaccatcaaggaccccgctgtgggatttctggaaaccatcagccctggctacagcatccacacctacctgtggcggcggcagtagtaactcgaggacggggtgaactacgcctgaggatccgatctttttccctctgccaaaaattatggggacatcatgaagccccttgagcatctgacttctggctaataaaggaaatttattttcattgcaatagtgtgttggaattttttgtgtctctcactcggcctaggtagataagtagcatggcgggttaatcattaactacaaggaacccctagtgatggagttggccactccctctctgcgcgctcgctcgctcactgaggccgggcgaccaaaggtcgcccgacgcccgggctttgcccgggcggcctcagtgagcgagcgagcgcgcag

SEQ ID NO: 1813 - DNA, 3375 bp, Artificial Sequence
  source: /note="Description of Artificial Sequence: Synthetic polynucleotide"
ctgcgcgctcgctcgctcactgaggccgcccgggcaaagcccgggcgtcgggcgacctttggtcgcccggcctcagtgagcgagcgagcgcgcagagagggagtggccaactccatcactaggggttccttgtagttaatgattaacccgccatgctacttatctaccagggtaatggggatcctctagaactatagctagtcgacataacgcgtgcatgcgtgaggctccggtgcccgtcagtgggcagagcgcacatcgcccacagtccccgagaagttggggggaggggtcggcaattgaaccggtgcctagagaaggtggcgcggggtaaactgggaaagtgatgtcgtgtactggctccgcctttttcccgagggtgggggagaaccgtatataagtgcagtagtcgccgtgaacgttctttttcgcaacgggtttgccgccagaacacaggtaagtgccgtgtgtggttcccgcgggcctggcctctttacgggttatggcccttgcgtgccttgaattacttccacctggctgcagtacgtgattcttgatcccgagcttcgggttggaagtgggtgggagagttcgaggccttgcgcttaaggagccccttcgcctcgtgcttgagttgaggcctggcctgggcgctggggccgccgcgtgcgaatctggtggcaccttcgcgcctgtctcgctgctttcgataagtctctagccatttaaaatttttgatgacctgctgcgacgctttttttctggcaagatagtcttgtaaatgcgggccaagatctgcacactggtatttcggtttttggggccgcgggcggcgacggggcccgtgcgtcccagcgcacatgttcggcgaggcggggcctgcgagcgcggccaccgagaatcggacgggggtagtctcaagctggccggcctgctctggtgcctggcctcgcgccgccgtgtatcgccccgccctgggcggcaaggctggcccggtcggcaccagttgcgtgagcggaaagatggccgcttcccggccctgctgcagggagctcaaaatggaggacgcggcgctcgggagagcgggcgggtgagtcacccacacaaaggaaaagggcctttccgtcctcagccgtcgcttcatgtgactccacggagtaccgggcgccgtccaggcacctcgattagttctcgagcttttggagtacgtcgtctttaggttggggggaggggttttatgcgatggagtttccccacactgagtgggtggagactgaagttaggccagcttggcacttgatgtaattctccttggaatttgccctttttgagtttggatcttggttcattctcaagcctcagacagtggttcaaagtttttttcttccatttcaggtgtcgtgagggattcgaaccggtgccgccaccatggaattctctagcccatctagagaggaatgtcctaagcctctgtcaagagtgtccatcatggccggcagcctgacaggcctgctgctgctgcaggccgtgtcctgggccagtggagcccggccctgcatccctaagtccttcggctattctagcgtggtctgcgtgtgtaatgccacttactgcgacagcttcgaccctcctaccttccccgcccttggaacattcagcagatacgagagcaccagaagcggcagaagaatggaactgagcatgggcccaatccaggccaaccacaccggcaccggcctgctgctgacactgcaacctgagcagaagttccagaaggtgaagggatttggaggcgccatgaccgacgctgctgctctgaacatcctggccctctccccacctgctcagaacctgctgcttaaaagctacttcagcgaggaaggcatcggctataacatcatcagagtgcccatggccagctgcgacttcagcatcagaacatacacctacgccgatacacctgatgacttccaactgcacaacttcagcctgcctgaagaggacacaaagctgaaaatccccctgatccaccgggccctgcagctggcccagagacctgtgagcctgctggcctctccttggacaagccccacctggctgaagaccaatggagctgtgaacggcaagggcagcctgaagggccagcccggcgacatctaccaccaaacctgggctcgctacttcgtgaaattcctggacgcctacgctgagcataagctgcaattttgggccgttacagccgagaacgagccttctgccggcctgctgtctggatatcctttccagtgcctgggcttcacccctgagcaccagagagactttatcgccagagatctggggcctaccctggctaacagcacacaccacaacgtgcggctgctgatgctggacgatcagaggctgctgctcccccactgggccaaggtggtgctgacagatccggaggccgccaaatacgtgcacggcatcgccgtccactggtacctggatttcctggcccctgccaaggccaccctgggcgagacacatagactgtttcctaataccatgctgttcgccagcgaggcctgcgtgggcagcaagttctgggaacagagcgtgcggctgggcagctgggacagaggaatgcagtacagccacagcatcattaccaacctgctgtaccacgtggtgggctggaccgactggaacctggccctgaaccccgaaggcggccccaactgggtgcggaacttcgtggactctcctatcatcgtggatattaccaaggataccttttacaagcagcctatgttctaccacctgggccacttcagcaagttcatccctgagggctctcagcgggtgggcctggtggcctctcagaaaaacgacctggatgccgttgccctgatgcaccccgacggcagcgccgtggtggtcgtcctgaatagaagctccaaggacgtgcctctgaccatcaaggaccccgctgtgggatttctggaaaccatcagccctggctacagcatccacacctacctgtggcggcggcagtagtaactcgaggacggggtgaactacgcctgaggatccgatctttttccctctgccaaaaattatggggacatcatgaagccccttgagcatctgacttctggctaataaaggaaatttattttcattgcaatagtgtgttggaattttttgtgtctctcactcggcctaggtagataagtagcatggcgggttaatcattaactacaaggaacccctagtgatggagttggccactccctctctgcgcgctcgctcgctcactgaggccgggcgaccaaaggtcgcccgacgcccgggctttgcccgggcggcctcagtgagcgagcgagcgcgcag

SEQ ID NO: 1814 - DNA, 3360 bp, Artificial Sequence
  source: /note="Description of Artificial Sequence: Synthetic polynucleotide"
ctgcgcgctcgctcgctcactgaggccgcccgggcaaagcccgggcgtcgggcgacctttggtcgcccggcctcagtgagcgagcgagcgcgcagagagggagtggccaactccatcactaggggttccttgtagttaatgattaacccgccatgctacttatctaccagggtaatggggatcctctagaactatagctagtcgacataacgcgtgttgacattgattattgactagttattaatagtaatcaattacggggtcattagttcatagcccatatatggagttccgcgttacataacttacggtaaatggcccgcctggctgaccgcccaacgacccccgcccattgacgtcaataatgacgtatgttcccatagtaacgccaatagggactttccattgacgtcaatgggtggagtatttacggtaaactgcccacttggcagtacatcaagtgtatcatatgccaagtacgccccctattgacgtcaatgacggtaaatggcccgcctggcattatgcccagtacatgaccttatgggactttcctacttggcagtacatctacgtattagtcatcgctattaccatggtgatgcggttttggcagtacatcaatgggcgtggatagcggtttgactcacggggatttccaagtctccaccccattgacgtcaatgggagtttgttttggcaccaaaatcaacgggactttccaaaatgtcgtaacaactccgccccattgacgcaaatgggcggtaggcgtgtacggtgggaggtctatataagcagagctcaagcttcgtttagtgaaccgtcagatcgcctggagacgccatccacgctgttttgacctccatagaagacaccgggaccgatccagcctccgcggattcgaatcccggccgggaacggtgcattggaacgcggattccccgtgccaagagtgacgtaagtaccgcctatagagtctataggcccacaaaaaatgctttcttcttttaatatacttttttgtttatcttatttctaatactttccctaatctctttctttcagggcaataatgatacaatgtatcatgcctctttgcaccattctaaagaataacagtgataatttctgggttaaggcaatagcaatatttctgcatataaatatttctgcatataaattgtaactgatgtaagaggtttcatattgctaatagcagctacaatccagctaccattctgcttttattttatggttgggataaggctggattattctgagtccaagctaggcccttttgctaatcatgttcatacctcttatcttcctcccacagctcctgggcaacgtgctggtctgtgtgctggcccatcactttggcaaagaattgggattcgaaccggtgccgccaccatggaattctctagcccatctagagaggaatgtcctaagcctctgtcaagagtgtccatcatggccggcagcctgacaggcctgctgctgctgcaggccgtgtcctgggccagtggagcccggccctgcatccctaagtccttcggctattctagcgtggtctgcgtgtgtaatgccacttactgcgacagcttcgaccctcctaccttccccgcccttggaacattcagcagatacgagagcaccagaagcggcagaagaatggaactgagcatgggcccaatccaggccaaccacaccggcaccggcctgctgctgacactgcaacctgagcagaagttccagaaggtgaagggatttggaggcgccatgaccgacgctgctgctctgaacatcctggccctctccccacctgctcagaacctgctgcttaaaagctacttcagcgaggaaggcatcggctataacatcatcagagtgcccatggccagctgcgacttcagcatcagaacatacacctacgccgatacacctgatgacttccaactgcacaacttcagcctgcctgaagaggacacaaagctgaaaatccccctgatccaccgggccctgcagctggcccagagacctgtgagcctgctggcctctccttggacaagccccacctggctgaagaccaatggagctgtgaacggcaagggcagcctgaagggccagcccggcgacatctaccaccaaacctgggctcgctacttcgtgaaattcctggacgcctacgctgagcataagctgcaattttgggccgttacagccgagaacgagccttctgccggcctgctgtctggatatcctttccagtgcctgggcttcacccctgagcaccagagagactttatcgccagagatctggggcctaccctggctaacagcacacaccacaacgtgcggctgctgatgctggacgatcagaggctgctgctcccccactgggccaaggtggtgctgacagatccggaggccgccaaatacgtgcacggcatcgccgtccactggtacctggatttcctggcccctgccaaggccaccctgggcgagacacatagactgtttcctaataccatgctgttcgccagcgaggcctgcgtgggcagcaagttctgggaacagagcgtgcggctgggcagctgggacagaggaatgcagtacagccacagcatcattaccaacctgctgtaccacgtggtgggctggaccgactggaacctggccctgaaccccgaaggcggccccaactgggtgcggaacttcgtggactctcctatcatcgtggatattaccaaggataccttttacaagcagcctatgttctaccacctgggccacttcagcaagttcatccctgagggctctcagcgggtgggcctggtggcctctcagaaaaacgacctggatgccgttgccctgatgcaccccgacggcagcgccgtggtggtcgtcctgaatagaagctccaaggacgtgcctctgaccatcaaggaccccgctgtgggatttctggaaaccatcagccctggctacagcatccacacctacctgtggcggcggcagtagtaactcgaggacggggtgaactacgcctgaggatccgatctttttccctctgccaaaaattatggggacatcatgaagccccttgagcatctgacttctggctaataaaggaaatttattttcattgcaatagtgtgttggaattttttgtgtctctcactcggcctaggtagataagtagcatggcgggttaatcattaactacaaggaacccctagtgatggagttggccactccctctctgcgcgctcgctcgctcactgaggccgggcgaccaaaggtcgcccgacgcccgggctttgcccgggcggcctcagtgagcgagcgagcgcgcag

SEQ ID NO: 1815 - DNA, 3901 bp, Artificial Sequence
  source: /note="Description of Artificial Sequence: Synthetic polynucleotide"
ctgcgcgctcgctcgctcactgaggccgcccgggcaaagcccgggcgtcgggcgacctttggtcgcccggcctcagtgagcgagcgagcgcgcagagagggagtggccaactccatcactaggggttccttgtagttaatgattaacccgccatgctacttatctaccagggtaatggggatcctctagaactatagctagtcgacataacgcgtctagttattaatagtaatcaattacggggtcattagttcatagcccatatatggagttccgcgttacataacttacggtaaatggcccgcctggctgaccgcccaacgacccccgcccattgacgtcaataatgacgtatgttcccatagtaacgccaatagggactttccattgacgtcaatgggtggagtatttacggtaaactgcccacttggcagtacatcaagtgtatcatatgccaagtacgccccctattgacgtcaatgacggtaaatggcccgcctggcattatgcccagtacatgaccttatgggactttcctacttggcagtacatctacgtattagtcatcgctattaccatggtcgaggtgagccccacgttctgcttcactctccccatctcccccccctccccacccccaattttgtatttatttattttttaattattttgtgcagcgatgggggcggggggggggggggggcgcgcgccaggcggggcggggcggggcgaggggcggggcggggcgaggcggagaggtgcggcggcagccaatcagagcggcgcgctccgaaagtttccttttatggcgaggcggcggcggcggcggccctataaaaagcgaagcgcgcggcgggcgggagtcgctgcgcgctgccttcgccccgtgccccgctccgccgccgcctcgcgccgcccgccccggctctgactgaccgcgttactcccacaggtgagcgggcgggacggcccttctcctccgggctgtaattagcgcttggtttaatgacggcttgtttcttttctgtggctgcgtgaaagccttgaggggctccgggagggccctttgtgcggggggagcggctcggggggtgcgtgcgtgtgtgtgtgcgtggggagcgccgcgtgcggctccgcgctgcccggcggctgtgagcgctgcgggcgcggcgcggggctttgtgcgctccgcagtgtgcgcgaggggagcgcggccgggggcggtgccccgcggtgcggggggggctgcgaggggaacaaaggctgcgtgcggggtgtgtgcgtgggggggtgagcagggggtgtgggcgcgtcggtcgggctgcaaccccccctgcacccccctccccgagttgctgagcacggcccggcttcgggtgcggggctccgtacggggcgtggcgcggggctcgccgtgccgggcggggggtggcggcaggtgggggtgccgggcggggcggggccgcctcgggccggggagggctcgggggaggggcgcggcggcccccggagcgccggcggctgtcgaggcgcggcgagccgcagccattgccttttatggtaatcgtgcgagagggcgcagggacttcctttgtcccaaatctgtgcggagccgaaatctgggaggcgccgccgcaccccctctagcgggcgcggggcgaagcggtgcggcgccggcaggaaggaaatgggcggggagggccttcgtgcgtcgccgcgccgccgtccccttctccctctccagcctcggggctgtccgcggggggacggctgccttcgggggggacggggcagggcggggttcggcttctggcgtgtgaccggcggctctagagcctctgctaaccatgttcatgccttcttctttttcctacagctcctgggcaacgtgctggttattgtgctgtctcatcattttggcaaagaattcgggattcgaaccggtgccgccaccatggaattctctagcccatctagagaggaatgtcctaagcctctgtcaagagtgtccatcatggccggcagcctgacaggcctgctgctgctgcaggccgtgtcctgggccagtggagcccggccctgcatccctaagtccttcggctattctagcgtggtctgcgtgtgtaatgccacttactgcgacagcttcgaccctcctaccttccccgcccttggaacattcagcagatacgagagcaccagaagcggcagaagaatggaactgagcatgggcccaatccaggccaaccacaccggcaccggcctgctgctgacactgcaacctgagcagaagttccagaaggtgaagggatttggaggcgccatgaccgacgctgctgctctgaacatcctggccctctccccacctgctcagaacctgctgcttaaaagctacttcagcgaggaaggcatcggctataacatcatcagagtgcccatggccagctgcgacttcagcatcagaacatacacctacgccgatacacctgatgacttccaactgcacaacttcagcctgcctgaagaggacacaaagctgaaaatccccctgatccaccgggccctgcagctggcccagagacctgtgagcctgctggcctctccttggacaagccccacctggctgaagaccaatggagctgtgaacggcaagggcagcctgaagggccagcccggcgacatctaccaccaaacctgggctcgctacttcgtgaaattcctggacgcctacgctgagcataagctgcaattttgggccgttacagccgagaacgagccttctgccggcctgctgtctggatatcctttccagtgcctgggcttcacccctgagcaccagagagactttatcgccagagatctggggcctaccctggctaacagcacacaccacaacgtgcggctgctgatgctggacgatcagaggctgctgctcccccactgggccaaggtggtgctgacagatccggaggccgccaaatacgtgcacggcatcgccgtccactggtacctggatttcctggcccctgccaaggccaccctgggcgagacacatagactgtttcctaataccatgctgttcgccagcgaggcctgcgtgggcagcaagttctgggaacagagcgtgcggctgggcagctgggacagaggaatgcagtacagccacagcatcattaccaacctgctgtaccacgtggtgggctggaccgactggaacctggccctgaaccccgaaggcggccccaactgggtgcggaacttcgtggactctcctatcatcgtggatattaccaaggataccttttacaagcagcctatgttctaccacctgggccacttcagcaagttcatccctgagggctctcagcgggtgggcctggtggcctctcagaaaaacgacctggatgccgttgccctgatgcaccccgacggcagcgccgtggtggtcgtcctgaatagaagctccaaggacgtgcctctgaccatcaaggaccccgctgtgggatttctggaaaccatcagccctggctacagcatccacacctacctgtggcggcggcagtagtaactcgaggacggggtgaactacgcctgaggatccgatctttttccctctgccaaaaattatggggacatcatgaagccccttgagcatctgacttctggctaataaaggaaatttattttcattgcaatagtgtgttggaattttttgtgtctctcactcggcctaggtagataagtagcatggcgggttaatcattaactacaaggaacccctagtgatggagttggccactccctctctgcgcgctcgctcgctcactgaggccgggcgaccaaaggtcgcccgacgcccgggctttgcccgggcggcctcagtgagcgagcgagcgcgcag

SEQ ID NO: 1816 - DNA, 3413 bp, Artificial Sequence
  source: /note="Description of Artificial Sequence: Synthetic polynucleotide"
ctgcgcgctcgctcgctcactgaggccgcccgggcaaagcccgggcgtcgggcgacctttggtcgcccggcctcagtgagcgagcgagcgcgcagagagggagtggccaactccatcactaggggttccttgtagttaatgattaacccgccatgctacttatctaccagggtaatggggatcctctagaactatagctagtcgacattgattattgactagttattaatagtaatcaattacggggtcattagttcatagcccatatatggagttccgcgttacataacttacggtaaatggcccgcctggctgaccgcccaacgacccccgcccattgacgtcaataatgacgtatgttcccatagtaacgccaatagggactttccattgacgtcaatgggtggagtatttacggtaaactgcccacttggcagtacatcaagtgtatcatatgccaagtacgccccctattgacgtcaatgacggtaaatggcccgcctggcattatgcccagtacatgaccttatgggactttcctacttggcagtacatctacgtattagtcatcgctattaccatgtcgaggccacgttctgcttcactctccccatctcccccccctccccacccccaattttgtatttatttattttttaattattttgtgcagcgatgggggcggggggggggggcgcgcgccaggcggggcggggcggggcgaggggcggggcggggcgaggcggagaggtgcggcggcagccaatcagagcggcgcgctccgaaagtttccttttatggcgaggcggcggcggcggcggccctataaaaagcgaagcgcgcggcgggcgggagcaagcttcgtttagtgaaccgtcagatcgcctggagacgccatccacgctgttttgacctccatagaagacaccgggaccgatccagcctccgcggattcgaatcccggccgggaacggtgcattggaacgcggattccccgtgccaagagtgacgtaagtaccgcctatagagtctataggcccacaaaaaatgctttcttcttttaatatacttttttgtttatcttatttctaatactttccctaatctctttctttcagggcaataatgatacaatgtatcatgcctctttgcaccattctaaagaataacagtgataatttctgggttaaggcaatagcaatatttctgcatataaatatttctgcatataaattgtaactgatgtaagaggtttcatattgctaatagcagctacaatccagctaccattctgcttttattttatggttgggataaggctggattattctgagtccaagctaggcccttttgctaatcatgttcatacctcttatcttcctcccacagctcctgggcaacgtgctggtctgtgtgctggcccatcactttggcaaagaattgggattcgaaccggtgccgccaccatggagttttcaagtccttccagagaggaatgtcccaagcctttgagtagggtaagcatcatggctggcagcctcacaggattgcttctacttcaggcagtgtcgtgggcatcaggtgcccgcccctgcatccctaaaagcttcggctacagctcggtggtgtgtgtctgcaatgccacatactgtgactcctttgaccccccgacctttcctgcccttggtaccttcagccgctatgagagtacacgcagtgggcgacggatggagctgagtatggggcccatccaggctaatcacacgggcacaggcctgctactgaccctgcagccagaacagaagttccagaaagtgaagggatttggaggggccatgacagatgctgctgctctcaacatccttgccctgtcaccccctgcccaaaatttgctacttaaatcgtacttctctgaagaaggaatcggatataacatcatccgggtacccatggccagctgtgacttctccatccgcacctacacctatgcagacacccctgatgatttccagttgcacaacttcagcctcccagaggaagataccaagctcaagatacccctgattcaccgagccctgcagttggcccagcgtcccgtttcactccttgccagcccctggacatcacccacttggctcaagaccaatggagcggtgaatgggaaggggtcactcaagggacagcccggagacatctaccaccagacctgggccagatactttgtgaagttcctggatgcctatgctgagcacaagttacagttctgggcagtgacagctgaaaatgagccttctgctgggctgttgagtggataccccttccagtgcctgggcttcacccctgaacatcagcgagacttcattgcccgtgacctaggtcctaccctcgccaacagtactcaccacaatgtccgcctactcatgctggatgaccaacgcttgctgctgccccactgggcaaaggtggtactgacagacccagaagcagctaaatatgttcatggcattgctgtacattggtacctggactttctggctccagccaaagccaccctaggggagacacaccgcctgttccccaacaccatgctctttgcctcagaggcctgtgtgggctccaagttctgggagcagagtgtgcggctaggctcctgggatcgagggatgcagtacagccacagcatcatcacgaacctcctgtaccatgtggtcggctggaccgactggaaccttgccctgaaccccgaaggaggacccaattgggtgcgtaactttgtcgacagtcccatcattgtagacatcaccaaggacacgttttacaaacagcccatgttctaccaccttggccacttcagcaagttcattcctgagggctcccagagagtggggctggttgccagtcagaagaacgacctggacgcagtggcactgatgcatcccgatggctctgctgttgtggtcgtgctaaaccgctcctctaaggatgtgcctcttaccatcaaggatcctgctgtgggcttcctggagacaatctcacctggctactccattcacacctacctgtggcgtcgccagtagtaactcgaggacggggtgaactacgcctgaggatccgatctttttccctctgccaaaaattatggggacatcatgaagccccttgagcatctgacttctggctaataaaggaaatttattttcattgcaatagtgtgttggaattttttgtgtctctcactcggcctaggtagataagtagcatggcgggttaatcattaactacaaggaacccctagtgatggagttggccactccctctctgcgcgctcgctcgctcactgaggccgggcgaccaaaggtcgcccgacgcccgggctttgcccgggcggcctcagtgagcgagcgagcgcgcag

SEQ ID NO: 1817 - DNA, 3878 bp, Artificial Sequence
  source: /note="Description of Artificial Sequence: Synthetic polynucleotide"
ctgcgcgctcgctcgctcactgaggccgcccgggcaaagcccgggcgtcgggcgacctttggtcgcccggcctcagtgagcgagcgagcgcgcagagagggagtggccaactccatcactaggggttccttgtagttaatgattaacccgccatgctacttatctaccagggtaatggggatcctctagaactatagctagtcgacattgattattgactagttattaatagtaatcaattacggggtcattagttcatagcccatatatggagttccgcgttacataacttacggtaaatggcccgcctggctgaccgcccaacgacccccgcccattgacgtcaataatgacgtatgttcccatagtaacgccaatagggactttccattgacgtcaatgggtggagtatttacggtaaactgcccacttggcagtacatcaagtgtatcatatgccaagtacgccccctattgacgtcaatgacggtaaatggcccgcctggcattatgcccagtacatgaccttatgggactttcctacttggcagtacatctacgtattagtcatcgctattaccatgtcgaggccacgttctgcttcactctccccatctcccccccctccccacccccaattttgtatttatttattttttaattattttgtgcagcgatgggggcggggggggggggcgcgcgccaggcggggcggggcggggcgaggggcggggcggggcgaggcggagaggtgcggcggcagccaatcagagcggcgcgctccgaaagtttccttttatggcgaggcggcggcggcggcggccctataaaaagcgaagcgcgcggcgggcgggagcaagcttcgtttagtgaaccgtcagatcgcctggagacgccatccacgctgttttgacctccatagaagacaccgggaccgatccagcctccgcggattcgaatcccggccgggaacggtgcattggaacgcggattccccgtgccaagagtgacgtaagtaccgcctatagagtctataggcccacaaaaaatgctttcttcttttaatatacttttttgtttatcttatttctaatactttccctaatctctttctttcagggcaataatgatacaatgtatcatgcctctttgcaccattctaaagaataacagtgataatttctgggttaaggcaatagcaatatttctgcatataaatatttctgcatataaattgtaactgatgtaagaggtttcatattgctaatagcagctacaatccagctaccattctgcttttattttatggttgggataaggctggattattctgagtccaagctaggcccttttgctaatcatgttcatacctcttatcttcctcccacagctcctgggcaacgtgctggtctgtgtgctggcccatcactttggcaaagaattgggattcgaaccggtgccgccaccatggagttttcaagtccttccagagaggaatgtcccaagcctttgagtagggtaagcatcatggctggcagcctcacaggattgcttctacttcaggcagtgtcgtgggcatcaggtgcccgcccctgcatccctaaaagcttcggctacagctcggtggtgtgtgtctgcaatgccacatactgtgactcctttgaccccccgacctttcctgcccttggtaccttcagccgctatgagagtacacgcagtgggcgacggatggagctgagtatggggcccatccaggctaatcacacgggcacaggcctgctactgaccctgcagccagaacagaagttccagaaagtgaagggatttggaggggccatgacagatgctgctgctctcaacatccttgccctgtcaccccctgcccaaaatttgctacttaaatcgtacttctctgaagaaggaatcggatataacatcatccgggtacccatggccagctgtgacttctccatccgcacctacacctatgcagacacccctgatgatttccagttgcacaacttcagcctcccagaggaagataccaagctcaagatacccctgattcaccgagccctgcagttggcccagcgtcccgtttcactccttgccagcccctggacatcacccacttggctcaagaccaatggagcggtgaatgggaaggggtcactcaagggacagcccggagacatctaccaccagacctgggccagatactttgtgaagttcctggatgcctatgctgagcacaagttacagttctgggcagtgacagctgaaaatgagccttctgctgggctgttgagtggataccccttccagtgcctgggcttcacccctgaacatcagcgagacttcattgcccgtgacctaggtcctaccctcgccaacagtactcaccacaatgtccgcctactcatgctggatgaccaacgcttgctgctgccccactgggcaaaggtggtactgacagacccagaagcagctaaatatgttcatggcattgctgtacattggtacctggactttctggctccagccaaagccaccctaggggagacacaccgcctgttccccaacaccatgctctttgcctcagaggcctgtgtgggctccaagttctgggagcagagtgtgcggctaggctcctgggatcgagggatgcagtacagccacagcatcatcacgaacctcctgtaccatgtggtcggctggaccgactggaaccttgccctgaaccccgaaggaggacccaattgggtgcgtaactttgtcgacagtcccatcattgtagacatcaccaaggacacgttttacaaacagcccatgttctaccaccttggccacttcagcaagttcattcctgagggctcccagagagtggggctggttgccagtcagaagaacgacctggacgcagtggcactgatgcatcccgatggctctgctgttgtggtcgtgctaaaccgctcctctaaggatgtgcctcttaccatcaaggatcctgctgtgggcttcctggagacaatctcacctggctactccattcacacctacctgtggcgtcgccagagaaagaggcgagagggcagaggaagtcttctaacatgcggtgacgtggaggagaatcccggccctatgtacgccctcttcctcctggccagcctcctgggcgcggctctagccgtgaaagagatgcccatgcagactctggtccccgccaaagtggcctccaagaatgtcatccctgccctggaactggtggagcccattaagaagcacgaggtcccagcaaagtctgatgtttactgtgaggtgtgtgaattcctggtgaaggaggtgaccaagctgattgacaacaacaagactgagaaagaaatactcgacgcttttgacaaaatgtgctcgaagctgccgaagtccctgtcggaagagtgccaggaggtggtggacacgtacggcagctccatcctgtccatcctgctggaggaggtcagccctgagctggtgtgcagcatgctgcacctctgctctggctagtaactcgaggacggggtgaactacgcctgaggatccgatctttttccctctgccaaaaattatggggacatcatgaagccccttgagcatctgacttctggctaataaaggaaatttattttcattgcaatagtgtgttggaattttttgtgtctctcactcggcctaggtagataagtagcatggcgggttaatcattaactacaaggaacccctagtgatggagttggccactccctctctgcgcgctcgctcgctcactgaggccgggcgaccaaaggtcgcccgacgcccgggctttgcccgggcggcctcagtgagcgagcgagcgcgcag

SEQ ID NO: 1818 - DNA, 3512 bp, Artificial Sequence
  source: /note="Description of Artificial Sequence: Synthetic polynucleotide"
ctgcgcgctcgctcgctcactgaggccgcccgggcaaagcccgggcgtcgggcgacctttggtcgcccggcctcagtgagcgagcgagcgcgcagagagggagtggccaactccatcactaggggttccttgtagttaatgattaacccgccatgctacttatctaccagggtaatggggatcctctagaactatagctagtcgacattgattattgactagttattaatagtaatcaattacggggtcattagttcatagcccatatatggagttccgcgttacataacttacggtaaatggcccgcctggctgaccgcccaacgacccccgcccattgacgtcaataatgacgtatgttcccatagtaacgccaatagggactttccattgacgtcaatgggtggagtatttacggtaaactgcccacttggcagtacatcaagtgtatcatatgccaagtacgccccctattgacgtcaatgacggtaaatggcccgcctggcattatgcccagtacatgaccttatgggactttcctacttggcagtacatctacgtattagtcatcgctattaccatgtcgaggccacgttctgcttcactctccccatctcccccccctccccacccccaattttgtatttatttattttttaattattttgtgcagcgatgggggcggggggggggggcgcgcgccaggcggggcggggcggggcgaggggcggggcggggcgaggcggagaggtgcggcggcagccaatcagagcggcgcgctccgaaagtttccttttatggcgaggcggcggcggcggcggccctataaaaagcgaagcgcgcggcgggcgggagcaagcttcgtttagtgaaccgtcagatcgcctggagacgccatccacgctgttttgacctccatagaagacaccgggaccgatccagcctccgcggattcgaatcccggccgggaacggtgcattggaacgcggattccccgtgccaagagtgacgtaagtaccgcctatagagtctataggcccacaaaaaatgctttcttcttttaatatacttttttgtttatcttatttctaatactttccctaatctctttctttcagggcaataatgatacaatgtatcatgcctctttgcaccattctaaagaataacagtgataatttctgggttaaggcaatagcaatatttctgcatataaatatttctgcatataaattgtaactgatgtaagaggtttcatattgctaatagcagctacaatccagctaccattctgcttttattttatggttgggataaggctggattattctgagtccaagctaggcccttttgctaatcatgttcatacctcttatcttcctcccacagctcctgggcaacgtgctggtctgtgtgctggcccatcactttggcaaagaattgggattcgaaccggtgccgccaccatggagttttcaagtccttccagagaggaatgtcccaagcctttgagtagggtaagcatcatggctggcagcctcacaggattgcttctacttcaggcagtgtcgtgggcatcaggtgcccgcccctgcatccctaaaagcttcggctacagctcggtggtgtgtgtctgcaatgccacatactgtgactcctttgaccccccgacctttcctgcccttggtaccttcagccgctatgagagtacacgcagtgggcgacggatggagctgagtatggggcccatccaggctaatcacacgggcacaggcctgctactgaccctgcagccagaacagaagttccagaaagtgaagggatttggaggggccatgacagatgctgctgctctcaacatccttgccctgtcaccccctgcccaaaatttgctacttaaatcgtacttctctgaagaaggaatcggatataacatcatccgggtacccatggccagctgtgacttctccatccgcacctacacctatgcagacacccctgatgatttccagttgcacaacttcagcctcccagaggaagataccaagctcaagatacccctgattcaccgagccctgcagttggcccagcgtcccgtttcactccttgccagcccctggacatcacccacttggctcaagaccaatggagcggtgaatgggaaggggtcactcaagggacagcccggagacatctaccaccagacctgggccagatactttgtgaagttcctggatgcctatgctgagcacaagttacagttctgggcagtgacagctgaaaatgagccttctgctgggctgttgagtggataccccttccagtgcctgggcttcacccctgaacatcagcgagacttcattgcccgtgacctaggtcctaccctcgccaacagtactcaccacaatgtccgcctactcatgctggatgaccaacgcttgctgctgccccactgggcaaaggtggtactgacagacccagaagcagctaaatatgttcatggcattgctgtacattggtacctggactttctggctccagccaaagccaccctaggggagacacaccgcctgttccccaacaccatgctctttgcctcagaggcctgtgtgggctccaagttctgggagcagagtgtgcggctaggctcctgggatcgagggatgcagtacagccacagcatcatcacgaacctcctgtaccatgtggtcggctggaccgactggaaccttgccctgaaccccgaaggaggacccaattgggtgcgtaactttgtcgacagtcccatcattgtagacatcaccaaggacacgttttacaaacagcccatgttctaccaccttggccacttcagcaagttcattcctgagggctcccagagagtggggctggttgccagtcagaagaacgacctggacgcagtggcactgatgcatcccgatggctctgctgttgtggtcgtgctaaaccgctcctctaaggatgtgcctcttaccatcaaggatcctgctgtgggcttcctggagacaatctcacctggctactccattcacacctacctgtggcgtcgccagggaggggggggttcgggtggcggcggaagtgggggcggtggttctctacggaagctgcggaagcggctactgctgcggaaacttcggaaacggctactgtagtaactcgaggacggggtgaactacgcctgaggatccgatctttttccctctgccaaaaattatggggacatcatgaagccccttgagcatctgacttctggctaataaaggaaatttattttcattgcaatagtgtgttggaattttttgtgtctctcactcggcctaggtagataagtagcatggcgggttaatcattaactacaaggaacccctagtgatggagttggccactccctctctgcgcgctcgctcgctcactgaggccgggcgaccaaaggtcgcccgacgcccgggctttgcccgggcggcctcagtgagcgagcgagcgcgcag

SEQ ID NO: 1819 - DNA, 3476 bp, Artificial Sequence
  source: /note="Description of Artificial Sequence: Synthetic polynucleotide"
ctgcgcgctcgctcgctcactgaggccgcccgggcaaagcccgggcgtcgggcgacctttggtcgcccggcctcagtgagcgagcgagcgcgcagagagggagtggccaactccatcactaggggttccttgtagttaatgattaacccgccatgctacttatctaccagggtaatggggatcctctagaactatagctagtcgacattgattattgactagttattaatagtaatcaattacggggtcattagttcatagcccatatatggagttccgcgttacataacttacggtaaatggcccgcctggctgaccgcccaacgacccccgcccattgacgtcaataatgacgtatgttcccatagtaacgccaatagggactttccattgacgtcaatgggtggagtatttacggtaaactgcccacttggcagtacatcaagtgtatcatatgccaagtacgccccctattgacgtcaatgacggtaaatggcccgcctggcattatgcccagtacatgaccttatgggactttcctacttggcagtacatctacgtattagtcatcgctattaccatgtcgaggccacgttctgcttcactctccccatctcccccccctccccacccccaattttgtatttatttattttttaattattttgtgcagcgatgggggcggggggggggggcgcgcgccaggcggggcggggcggggcgaggggcggggcggggcgaggcggagaggtgcggcggcagccaatcagagcggcgcgctccgaaagtttccttttatggcgaggcggcggcggcggcggccctataaaaagcgaagcgcgcggcgggcgggagcaagcttcgtttagtgaaccgtcagatcgcctggagacgccatccacgctgttttgacctccatagaagacaccgggaccgatccagcctccgcggattcgaatcccggccgggaacggtgcattggaacgcggattccccgtgccaagagtgacgtaagtaccgcctatagagtctataggcccacaaaaaatgctttcttcttttaatatacttttttgtttatcttatttctaatactttccctaatctctttctttcagggcaataatgatacaatgtatcatgcctctttgcaccattctaaagaataacagtgataatttctgggttaaggcaatagcaatatttctgcatataaatatttctgcatataaattgtaactgatgtaagaggtttcatattgctaatagcagctacaatccagctaccattctgcttttattttatggttgggataaggctggattattctgagtccaagctaggcccttttgctaatcatgttcatacctcttatcttcctcccacagctcctgggcaacgtgctggtctgtgtgctggcccatcactttggcaaagaattgggattcgaaccggtgccgccaccatggagttttcaagtccttccagagaggaatgtcccaagcctttgagtagggtaagcatcatggctggcagcctcacaggattgcttctacttcaggcagtgtcgtgggcatcaggtatgaaggagaccgctgctgcaaagttcgagagacagcatatggatagctccacaagcgccgcagcccgcccctgcatccctaaaagcttcggctacagctcggtggtgtgtgtctgcaatgccacatactgtgactcctttgaccccccgacctttcctgcccttggtaccttcagccgctatgagagtacacgcagtgggcgacggatggagctgagtatggggcccatccaggctaatcacacgggcacaggcctgctactgaccctgcagccagaacagaagttccagaaagtgaagggatttggaggggccatgacagatgctgctgctctcaacatccttgccctgtcaccccctgcccaaaatttgctacttaaatcgtacttctctgaagaaggaatcggatataacatcatccgggtacccatggccagctgtgacttctccatccgcacctacacctatgcagacacccctgatgatttccagttgcacaacttcagcctcccagaggaagataccaagctcaagatacccctgattcaccgagccctgcagttggcccagcgtcccgtttcactccttgccagcccctggacatcacccacttggctcaagaccaatggagcggtgaatgggaaggggtcactcaagggacagcccggagacatctaccaccagacctgggccagatactttgtgaagttcctggatgcctatgctgagcacaagttacagttctgggcagtgacagctgaaaatgagccttctgctgggctgttgagtggataccccttccagtgcctgggcttcacccctgaacatcagcgagacttcattgcccgtgacctaggtcctaccctcgccaacagtactcaccacaatgtccgcctactcatgctggatgaccaacgcttgctgctgccccactgggcaaaggtggtactgacagacccagaagcagctaaatatgttcatggcattgctgtacattggtacctggactttctggctccagccaaagccaccctaggggagacacaccgcctgttccccaacaccatgctctttgcctcagaggcctgtgtgggctccaagttctgggagcagagtgtgcggctaggctcctgggatcgagggatgcagtacagccacagcatcatcacgaacctcctgtaccatgtggtcggctggaccgactggaaccttgccctgaaccccgaaggaggacccaattgggtgcgtaactttgtcgacagtcccatcattgtagacatcaccaaggacacgttttacaaacagcccatgttctaccaccttggccacttcagcaagttcattcctgagggctcccagagagtggggctggttgccagtcagaagaacgacctggacgcagtggcactgatgcatcccgatggctctgctgttgtggtcgtgctaaaccgctcctctaaggatgtgcctcttaccatcaaggatcctgctgtgggcttcctggagacaatctcacctggctactccattcacacctacctgtggcgtcgccagtagtaactcgaggacggggtgaactacgcctgaggatccgatctttttccctctgccaaaaattatggggacatcatgaagccccttgagcatctgacttctggctaataaaggaaatttattttcattgcaatagtgtgttggaattttttgtgtctctcactcggcctaggtagataagtagcatggcgggttaatcattaactacaaggaacccctagtgatggagttggccactccctctctgcgcgctcgctcgctcactgaggccgggcgaccaaaggtcgcccgacgcccgggctttgcccgggcggcctcagtgagcgagcgagcgcgcag

SEQ ID NO: 1820 - DNA, 3428 bp, Artificial Sequence
  source: /note="Description of Artificial Sequence: Synthetic polynucleotide"
ctgcgcgctcgctcgctcactgaggccgcccgggcaaagcccgggcgtcgggcgacctttggtcgcccggcctcagtgagcgagcgagcgcgcagagagggagtggccaactccatcactaggggttccttgtagttaatgattaacccgccatgctacttatctaccagggtaatggggatcctctagaactatagctagtcgacattgattattgactagttattaatagtaatcaattacggggtcattagttcatagcccatatatggagttccgcgttacataacttacggtaaatggcccgcctggctgaccgcccaacgacccccgcccattgacgtcaataatgacgtatgttcccatagtaacgccaatagggactttccattgacgtcaatgggtggagtatttacggtaaactgcccacttggcagtacatcaagtgtatcatatgccaagtacgccccctattgacgtcaatgacggtaaatggcccgcctggcattatgcccagtacatgaccttatgggactttcctacttggcagtacatctacgtattagtcatcgctattaccatgtcgaggccacgttctgcttcactctccccatctcccccccctccccacccccaattttgtatttatttattttttaattattttgtgcagcgatgggggcggggggggggggcgcgcgccaggcggggcggggcggggcgaggggcggggcggggcgaggcggagaggtgcggcggcagccaatcagagcggcgcgctccgaaagtttccttttatggcgaggcggcggcggcggcggccctataaaaagcgaagcgcgcggcgggcgggagcaagcttcgtttagtgaaccgtcagatcgcctggagacgccatccacgctgttttgacctccatagaagacaccgggaccgatccagcctccgcggattcgaatcccggccgggaacggtgcattggaacgcggattccccgtgccaagagtgacgtaagtaccgcctatagagtctataggcccacaaaaaatgctttcttcttttaatatacttttttgtttatcttatttctaatactttccctaatctctttctttcagggcaataatgatacaatgtatcatgcctctttgcaccattctaaagaataacagtgataatttctgggttaaggcaatagcaatatttctgcatataaatatttctgcatataaattgtaactgatgtaagaggtttcatattgctaatagcagctacaatccagctaccattctgcttttattttatggttgggataaggctggattattctgagtccaagctaggcccttttgctaatcatgttcatacctcttatcttcctcccacagctcctgggcaacgtgctggtctgtgtgctggcccatcactttggcaaagaattgggattcgaaccggtgccgccaccatggagttttcaagtccttccagagaggaatgtcccaagcctttgagtagggtaagcatcatggctggcagcctcacaggattgcttctacttcaggcagtgtcgtgggcatcaggtgcccgcccctgcatccctaaaagcttcggctacagctcggtggtgtgtgtctgcaatgccacatactgtgactcctttgaccccccgacctttcctgcccttggtaccttcagccgctatgagagtacacgcagtgggcgacggatggagctgagtatggggcccatccaggctaatcacacgggcacaggcctgctactgaccctgcagccagaacagaagttccagaaagtgaagggatttggaggggccatgacagatgctgctgctctcaacatccttgccctgtcaccccctgcccaaaatttgctacttaaatcgtacttctctgaagaaggaatcggatataacatcatccgggtacccatggccagctgtgacttctccatccgcacctacacctatgcagacacccctgatgatttccagttgcacaacttcagcctcccagaggaagataccaagctcaagatacccctgattcaccgagccctgcagttggcccagcgtcccgtttcactccttgccagcccctggacatcacccacttggctcaagaccaatggagcggtgaatgggaaggggtcactcaagggacagcccggagacatctaccaccagacctgggccagatactttgtgaagttcctggatgcctatgctgagcacaagttacagttctgggcagtgacagctgaaaatgagccttctgctgggctgttgagtggataccccttccagtgcctgggcttcacccctgaacatcagcgagacttcattgcccgtgacctaggtcctaccctcgccaacagtactcaccacaatgtccgcctactcatgctggatgaccaacgcttgctgctgccccactgggcaaaggtggtactgacagacccagaagcagctaaatatgttcatggcattgctgtacattggtacctggactttctggctccagccaaagccaccctaggggagacacaccgcctgttccccaacaccatgctctttgcctcagaggcctgtgtgggctccaagttctgggagcagagtgtgcggctaggctcctgggatcgagggatgcagtacagccacagcatcatcacgaacctcctgtaccatgtggtcggctggaccgactggaaccttgccctgaaccccgaaggaggacccaattgggtgcgtaactttgtcgacagtcccatcattgtagacatcaccaaggacacgttttacaaacagcccatgttctaccaccttggccacttcagcaagttcattcctgagggctcccagagagtggggctggttgccagtcagaagaacgacctggacgcagtggcactgatgcatcccgatggctctgctgttgtggtcgtgctaaaccgctcctctaaggatgtgcctcttaccatcaaggatcctgctgtgggcttcctggagacaatctcacctggctactccattcacacctacctgtggcgtcgccagcagagattcttcgagtagtaactcgaggacggggtgaactacgcctgaggatccgatctttttccctctgccaaaaattatggggacatcatgaagccccttgagcatctgacttctggctaataaaggaaatttattttcattgcaatagtgtgttggaattttttgtgtctctcactcggcctaggtagataagtagcatggcgggttaatcattaactacaaggaacccctagtgatggagttggccactccctctctgcgcgctcgctcgctcactgaggccgggcgaccaaaggtcgcccgacgcccgggctttgcccgggcggcctcagtgagcgagcgagcgcgcag

SEQ ID NO: 1821 - DNA, 3375 bp, Artificial Sequence
  source: /note="Description of Artificial Sequence: Synthetic polynucleotide"
ctgcgcgctcgctcgctcactgaggccgcccgggcaaagcccgggcgtcgggcgacctttggtcgcccggcctcagtgagcgagcgagcgcgcagagagggagtggccaactccatcactaggggttccttgtagttaatgattaacccgccatgctacttatctaccagggtaatggggatcctctagaactatagctagtcgacataacgcgtgcatgcgtgaggctccggtgcccgtcagtgggcagagcgcacatcgcccacagtccccgagaagttggggggaggggtcggcaattgaaccggtgcctagagaaggtggcgcggggtaaactgggaaagtgatgtcgtgtactggctccgcctttttcccgagggtgggggagaaccgtatataagtgcagtagtcgccgtgaacgttctttttcgcaacgggtttgccgccagaacacaggtaagtgccgtgtgtggttcccgcgggcctggcctctttacgggttatggcccttgcgtgccttgaattacttccacctggctgcagtacgtgattcttgatcccgagcttcgggttggaagtgggtgggagagttcgaggccttgcgcttaaggagccccttcgcctcgtgcttgagttgaggcctggcctgggcgctggggccgccgcgtgcgaatctggtggcaccttcgcgcctgtctcgctgctttcgataagtctctagccatttaaaatttttgatgacctgctgcgacgctttttttctggcaagatagtcttgtaaatgcgggccaagatctgcacactggtatttcggtttttggggccgcgggcggcgacggggcccgtgcgtcccagcgcacatgttcggcgaggcggggcctgcgagcgcggccaccgagaatcggacgggggtagtctcaagctggccggcctgctctggtgcctggcctcgcgccgccgtgtatcgccccgccctgggcggcaaggctggcccggtcggcaccagttgcgtgagcggaaagatggccgcttcccggccctgctgcagggagctcaaaatggaggacgcggcgctcgggagagcgggcgggtgagtcacccacacaaaggaaaagggcctttccgtcctcagccgtcgcttcatgtgactccacggagtaccgggcgccgtccaggcacctcgattagttctcgagcttttggagtacgtcgtctttaggttggggggaggggttttatgcgatggagtttccccacactgagtgggtggagactgaagttaggccagcttggcacttgatgtaattctccttggaatttgccctttttgagtttggatcttggttcattctcaagcctcagacagtggttcaaagtttttttcttccatttcaggtgtcgtgagggattcgaaccggtgccgccaccatggagttttcaagtccttccagagaggaatgtcccaagcctttgagtagggtaagcatcatggctggcagcctcacaggattgcttctacttcaggcagtgtcgtgggcatcaggtgcccgcccctgcatccctaaaagcttcggctacagctcggtggtgtgtgtctgcaatgccacatactgtgactcctttgaccccccgacctttcctgcccttggtaccttcagccgctatgagagtacacgcagtgggcgacggatggagctgagtatggggcccatccaggctaatcacacgggcacaggcctgctactgaccctgcagccagaacagaagttccagaaagtgaagggatttggaggggccatgacagatgctgctgctctcaacatccttgccctgtcaccccctgcccaaaatttgctacttaaatcgtacttctctgaagaaggaatcggatataacatcatccgggtacccatggccagctgtgacttctccatccgcacctacacctatgcagacacccctgatgatttccagttgcacaacttcagcctcccagaggaagataccaagctcaagatacccctgattcaccgagccctgcagttggcccagcgtcccgtttcactccttgccagcccctggacatcacccacttggctcaagaccaatggagcggtgaatgggaaggggtcactcaagggacagcccggagacatctaccaccagacctgggccagatactttgtgaagttcctggatgcctatgctgagcacaagttacagttctgggcagtgacagctgaaaatgagccttctgctgggctgttgagtggataccccttccagtgcctgggcttcacccctgaacatcagcgagacttcattgcccgtgacctaggtcctaccctcgccaacagtactcaccacaatgtccgcctactcatgctggatgaccaacgcttgctgctgccccactgggcaaaggtggtactgacagacccagaagcagctaaatatgttcatggcattgctgtacattggtacctggactttctggctccagccaaagccaccctaggggagacacaccgcctgttccccaacaccatgctctttgcctcagaggcctgtgtgggctccaagttctgggagcagagtgtgcggctaggctcctgggatcgagggatgcagtacagccacagcatcatcacgaacctcctgtaccatgtggtcggctggaccgactggaaccttgccctgaaccccgaaggaggacccaattgggtgcgtaactttgtcgacagtcccatcattgtagacatcaccaaggacacgttttacaaacagcccatgttctaccaccttggccacttcagcaagttcattcctgagggctcccagagagtggggctggttgccagtcagaagaacgacctggacgcagtggcactgatgcatcccgatggctctgctgttgtggtcgtgctaaaccgctcctctaaggatgtgcctcttaccatcaaggatcctgctgtgggcttcctggagacaatctcacctggctactccattcacacctacctgtggcgtcgccagtagtaactcgaggacggggtgaactacgcctgaggatccgatctttttccctctgccaaaaattatggggacatcatgaagccccttgagcatctgacttctggctaataaaggaaatttattttcattgcaatagtgtgttggaattttttgtgtctctcactcggcctaggtagataagtagcatggcgggttaatcattaactacaaggaacccctagtgatggagttggccactccctctctgcgcgctcgctcgctcactgaggccgggcgaccaaaggtcgcccgacgcccgggctttgcccgggcggcctcagtgagcgagcgagcgcgcag

SEQ ID NO: 1822 - DNA, 3878 bp, Artificial Sequence
  source: /note="Description of Artificial Sequence: Synthetic polynucleotide"
ctgcgcgctcgctcgctcactgaggccgcccgggcaaagcccgggcgtcgggcgacctttggtcgcccggcctcagtgagcgagcgagcgcgcagagagggagtggccaactccatcactaggggttccttgtagttaatgattaacccgccatgctacttatctaccagggtaatggggatcctctagaactatagctagtcgacattgattattgactagttattaatagtaatcaattacggggtcattagttcatagcccatatatggagttccgcgttacataacttacggtaaatggcccgcctggctgaccgcccaacgacccccgcccattgacgtcaataatgacgtatgttcccatagtaacgccaatagggactttccattgacgtcaatgggtggagtatttacggtaaactgcccacttggcagtacatcaagtgtatcatatgccaagtacgccccctattgacgtcaatgacggtaaatggcccgcctggcattatgcccagtacatgaccttatgggactttcctacttggcagtacatctacgtattagtcatcgctattaccatgtcgaggccacgttctgcttcactctccccatctcccccccctccccacccccaattttgtatttatttattttttaattattttgtgcagcgatgggggcggggggggggggcgcgcgccaggcggggcggggcggggcgaggggcggggcggggcgaggcggagaggtgcggcggcagccaatcagagcggcgcgctccgaaagtttccttttatggcgaggcggcggcggcggcggccctataaaaagcgaagcgcgcggcgggcgggagcaagcttcgtttagtgaaccgtcagatcgcctggagacgccatccacgctgttttgacctccatagaagacaccgggaccgatccagcctccgcggattcgaatcccggccgggaacggtgcattggaacgcggattccccgtgccaagagtgacgtaagtaccgcctatagagtctataggcccacaaaaaatgctttcttcttttaatatacttttttgtttatcttatttctaatactttccctaatctctttctttcagggcaataatgatacaatgtatcatgcctctttgcaccattctaaagaataacagtgataatttctgggttaaggcaatagcaatatttctgcatataaatatttctgcatataaattgtaactgatgtaagaggtttcatattgctaatagcagctacaatccagctaccattctgcttttattttatggttgggataaggctggattattctgagtccaagctaggcccttttgctaatcatgttcatacctcttatcttcctcccacagctcctgggcaacgtgctggtctgtgtgctggcccatcactttggcaaagaattgggattcgaaccggtgccgccaccatggaattctctagcccatctagagaggaatgtcctaagcctctgtcaagagtgtccatcatggccggcagcctgacaggcctgctgctgctgcaggccgtgtcctgggccagtggagcccggccctgcatccctaagtccttcggctattctagcgtggtctgcgtgtgtaatgccacttactgcgacagcttcgaccctcctaccttccccgcccttggaacattcagcagatacgagagcaccagaagcggcagaagaatggaactgagcatgggcccaatccaggccaaccacaccggcaccggcctgctgctgacactgcaacctgagcagaagttccagaaggtgaagggatttggaggcgccatgaccgacgctgctgctctgaacatcctggccctctccccacctgctcagaacctgctgcttaaaagctacttcagcgaggaaggcatcggctataacatcatcagagtgcccatggccagctgcgacttcagcatcagaacatacacctacgccgatacacctgatgacttccaactgcacaacttcagcctgcctgaagaggacacaaagctgaaaatccccctgatccaccgggccctgcagctggcccagagacctgtgagcctgctggcctctccttggacaagccccacctggctgaagaccaatggagctgtgaacggcaagggcagcctgaagggccagcccggcgacatctaccaccaaacctgggctcgctacttcgtgaaattcctggacgcctacgctgagcataagctgcaattttgggccgttacagccgagaacgagccttctgccggcctgctgtctggatatcctttccagtgcctgggcttcacccctgagcaccagagagactttatcgccagagatctggggcctaccctggctaacagcacacaccacaacgtgcggctgctgatgctggacgatcagaggctgctgctcccccactgggccaaggtggtgctgacagatccggaggccgccaaatacgtgcacggcatcgccgtccactggtacctggatttcctggcccctgccaaggccaccctgggcgagacacatagactgtttcctaataccatgctgttcgccagcgaggcctgcgtgggcagcaagttctgggaacagagcgtgcggctgggcagctgggacagaggaatgcagtacagccacagcatcattaccaacctgctgtaccacgtggtgggctggaccgactggaacctggccctgaaccccgaaggcggccccaactgggtgcggaacttcgtggactctcctatcatcgtggatattaccaaggataccttttacaagcagcctatgttctaccacctgggccacttcagcaagttcatccctgagggctctcagcgggtgggcctggtggcctctcagaaaaacgacctggatgccgttgccctgatgcaccccgacggcagcgccgtggtggtcgtcctgaatagaagctccaaggacgtgcctctgaccatcaaggaccccgctgtgggatttctggaaaccatcagccctggctacagcatccacacctacctgtggcggcggcagagaaagaggcgagagggcagaggaagtcttctaacatgcggtgacgtggaggagaatcccggccctatgtacgccctcttcctcctggccagcctcctgggcgcggctctagccgtgaaagagatgcccatgcagactctggtccccgccaaagtggcctccaagaatgtcatccctgccctggaactggtggagcccattaagaagcacgaggtcccagcaaagtctgatgtttactgtgaggtgtgtgaattcctggtgaaggaggtgaccaagctgattgacaacaacaagactgagaaagaaatactcgacgcttttgacaaaatgtgctcgaagctgccgaagtccctgtcggaagagtgccaggaggtggtggacacgtacggcagctccatcctgtccatcctgctggaggaggtcagccctgagctggtgtgcagcatgctgcacctctgctctggctagtaactcgaggacggggtgaactacgcctgaggatccgatctttttccctctgccaaaaattatggggacatcatgaagccccttgagcatctgacttctggctaataaaggaaatttattttcattgcaatagtgtgttggaattttttgtgtctctcactcggcctaggtagataagtagcatggcgggttaatcattaactacaaggaacccctagtgatggagttggccactccctctctgcgcgctcgctcgctcactgaggccgggcgaccaaaggtcgcccgacgcccgggctttgcccgggcggcctcagtgagcgagcgagcgcgcag

SEQ ID NO: 1823 - DNA, 3512 bp, Artificial Sequence
  source: /note="Description of Artificial Sequence: Synthetic polynucleotide"
ctgcgcgctcgctcgctcactgaggccgcccgggcaaagcccgggcgtcgggcgacctttggtcgcccggcctcagtgagcgagcgagcgcgcagagagggagtggccaactccatcactaggggttccttgtagttaatgattaacccgccatgctacttatctaccagggtaatggggatcctctagaactatagctagtcgacattgattattgactagttattaatagtaatcaattacggggtcattagttcatagcccatatatggagttccgcgttacataacttacggtaaatggcccgcctggctgaccgcccaacgacccccgcccattgacgtcaataatgacgtatgttcccatagtaacgccaatagggactttccattgacgtcaatgggtggagtatttacggtaaactgcccacttggcagtacatcaagtgtatcatatgccaagtacgccccctattgacgtcaatgacggtaaatggcccgcctggcattatgcccagtacatgaccttatgggactttcctacttggcagtacatctacgtattagtcatcgctattaccatgtcgaggccacgttctgcttcactctccccatctcccccccctccccacccccaattttgtatttatttattttttaattattttgtgcagcgatgggggcggggggggggggcgcgcgccaggcggggcggggcggggcgaggggcggggcggggcgaggcggagaggtgcggcggcagccaatcagagcggcgcgctccgaaagtttccttttatggcgaggcggcggcggcggcggccctataaaaagcgaagcgcgcggcgggcgggagcaagcttcgtttagtgaaccgtcagatcgcctggagacgccatccacgctgttttgacctccatagaagacaccgggaccgatccagcctccgcggattcgaatcccggccgggaacggtgcattggaacgcggattccccgtgccaagagtgacgtaagtaccgcctatagagtctataggcccacaaaaaatgctttcttcttttaatatacttttttgtttatcttatttctaatactttccctaatctctttctttcagggcaataatgatacaatgtatcatgcctctttgcaccattctaaagaataacagtgataatttctgggttaaggcaatagcaatatttctgcatataaatatttctgcatataaattgtaactgatgtaagaggtttcatattgctaatagcagctacaatccagctaccattctgcttttattttatggttgggataaggctggattattctgagtccaagctaggcccttttgctaatcatgttcatacctcttatcttcctcccacagctcctgggcaacgtgctggtctgtgtgctggcccatcactttggcaaagaattgggattcgaaccggtgccgccaccatggaattctctagcccatctagagaggaatgtcctaagcctctgtcaagagtgtccatcatggccggcagcctgacaggcctgctgctgctgcaggccgtgtcctgggccagtggagcccggccctgcatccctaagtccttcggctattctagcgtggtctgcgtgtgtaatgccacttactgcgacagcttcgaccctcctaccttccccgcccttggaacattcagcagatacgagagcaccagaagcggcagaagaatggaactgagcatgggcccaatccaggccaaccacaccggcaccggcctgctgctgacactgcaacctgagcagaagttccagaaggtgaagggatttggaggcgccatgaccgacgctgctgctctgaacatcctggccctctccccacctgctcagaacctgctgcttaaaagctacttcagcgaggaaggcatcggctataacatcatcagagtgcccatggccagctgcgacttcagcatcagaacatacacctacgccgatacacctgatgacttccaactgcacaacttcagcctgcctgaagaggacacaaagctgaaaatccccctgatccaccgggccctgcagctggcccagagacctgtgagcctgctggcctctccttggacaagccccacctggctgaagaccaatggagctgtgaacggcaagggcagcctgaagggccagcccggcgacatctaccaccaaacctgggctcgctacttcgtgaaattcctggacgcctacgctgagcataagctgcaattttgggccgttacagccgagaacgagccttctgccggcctgctgtctggatatcctttccagtgcctgggcttcacccctgagcaccagagagactttatcgccagagatctggggcctaccctggctaacagcacacaccacaacgtgcggctgctgatgctggacgatcagaggctgctgctcccccactgggccaaggtggtgctgacagatccggaggccgccaaatacgtgcacggcatcgccgtccactggtacctggatttcctggcccctgccaaggccaccctgggcgagacacatagactgtttcctaataccatgctgttcgccagcgaggcctgcgtgggcagcaagttctgggaacagagcgtgcggctgggcagctgggacagaggaatgcagtacagccacagcatcattaccaacctgctgtaccacgtggtgggctggaccgactggaacctggccctgaaccccgaaggcggccccaactgggtgcggaacttcgtggactctcctatcatcgtggatattaccaaggataccttttacaagcagcctatgttctaccacctgggccacttcagcaagttcatccctgagggctctcagcgggtgggcctggtggcctctcagaaaaacgacctggatgccgttgccctgatgcaccccgacggcagcgccgtggtggtcgtcctgaatagaagctccaaggacgtgcctctgaccatcaaggaccccgctgtgggatttctggaaaccatcagccctggctacagcatccacacctacctgtggcggcggcagggaggggggggttcgggtggcggcggaagtgggggcggtggttctctacggaagctgcggaagcggctactgctgcggaaacttcggaaacggctactgtagtaactcgaggacggggtgaactacgcctgaggatccgatctttttccctctgccaaaaattatggggacatcatgaagccccttgagcatctgacttctggctaataaaggaaatttattttcattgcaatagtgtgttggaattttttgtgtctctcactcggcctaggtagataagtagcatggcgggttaatcattaactacaaggaacccctagtgatggagttggccactccctctctgcgcgctcgctcgctcactgaggccgggcgaccaaaggtcgcccgacgcccgggctttgcccgggcggcctcagtgagcgagcgagcgcgcag

SEQ ID NO: 1824 - DNA, 3476 bp, Artificial Sequence
  source: /note="Description of Artificial Sequence: Synthetic polynucleotide"
ctgcgcgctcgctcgctcactgaggccgcccgggcaaagcccgggcgtcgggcgacctttggtcgcccggcctcagtgagcgagcgagcgcgcagagagggagtggccaactccatcactaggggttccttgtagttaatgattaacccgccatgctacttatctaccagggtaatggggatcctctagaactatagctagtcgacattgattattgactagttattaatagtaatcaattacggggtcattagttcatagcccatatatggagttccgcgttacataacttacggtaaatggcccgcctggctgaccgcccaacgacccccgcccattgacgtcaataatgacgtatgttcccatagtaacgccaatagggactttccattgacgtcaatgggtggagtatttacggtaaactgcccacttggcagtacatcaagtgtatcatatgccaagtacgccccctattgacgtcaatgacggtaaatggcccgcctggcattatgcccagtacatgaccttatgggactttcctacttggcagtacatctacgtattagtcatcgctattaccatgtcgaggccacgttctgcttcactctccccatctcccccccctccccacccccaattttgtatttatttattttttaattattttgtgcagcgatgggggcggggggggggggcgcgcgccaggcggggcggggcggggcgaggggcggggcggggcgaggcggagaggtgcggcggcagccaatcagagcggcgcgctccgaaagtttccttttatggcgaggcggcggcggcggcggccctataaaaagcgaagcgcgcggcgggcgggagcaagcttcgtttagtgaaccgtcagatcgcctggagacgccatccacgctgttttgacctccatagaagacaccgggaccgatccagcctccgcggattcgaatcccggccgggaacggtgcattggaacgcggattccccgtgccaagagtgacgtaagtaccgcctatagagtctataggcccacaaaaaatgctttcttcttttaatatacttttttgtttatcttatttctaatactttccctaatctctttctttcagggcaataatgatacaatgtatcatgcctctttgcaccattctaaagaataacagtgataatttctgggttaaggcaatagcaatatttctgcatataaatatttctgcatataaattgtaactgatgtaagaggtttcatattgctaatagcagctacaatccagctaccattctgcttttattttatggttgggataaggctggattattctgagtccaagctaggcccttttgctaatcatgttcatacctcttatcttcctcccacagctcctgggcaacgtgctggtctgtgtgctggcccatcactttggcaaagaattgggattcgaaccggtgccgccaccatggaattctctagcccatctagagaggaatgtcctaagcctctgtcaagagtgtccatcatggccggcagcctgacaggcctgctgctgctgcaggccgtgtcctgggccagtggaatgaaggagaccgctgctgcaaagttcgagagacagcatatggatagctccacaagcgccgcagcccggccctgcatccctaagtccttcggctattctagcgtggtctgcgtgtgtaatgccacttactgcgacagcttcgaccctcctaccttccccgcccttggaacattcagcagatacgagagcaccagaagcggcagaagaatggaactgagcatgggcccaatccaggccaaccacaccggcaccggcctgctgctgacactgcaacctgagcagaagttccagaaggtgaagggatttggaggcgccatgaccgacgctgctgctctgaacatcctggccctctccccacctgctcagaacctgctgcttaaaagctacttcagcgaggaaggcatcggctataacatcatcagagtgcccatggccagctgcgacttcagcatcagaacatacacctacgccgatacacctgatgacttccaactgcacaacttcagcctgcctgaagaggacacaaagctgaaaatccccctgatccaccgggccctgcagctggcccagagacctgtgagcctgctggcctctccttggacaagccccacctggctgaagaccaatggagctgtgaacggcaagggcagcctgaagggccagcccggcgacatctaccaccaaacctgggctcgctacttcgtgaaattcctggacgcctacgctgagcataagctgcaattttgggccgttacagccgagaacgagccttctgccggcctgctgtctggatatcctttccagtgcctgggcttcacccctgagcaccagagagactttatcgccagagatctggggcctaccctggctaacagcacacaccacaacgtgcggctgctgatgctggacgatcagaggctgctgctcccccactgggccaaggtggtgctgacagatccggaggccgccaaatacgtgcacggcatcgccgtccactggtacctggatttcctggcccctgccaaggccaccctgggcgagacacatagactgtttcctaataccatgctgttcgccagcgaggcctgcgtgggcagcaagttctgggaacagagcgtgcggctgggcagctgggacagaggaatgcagtacagccacagcatcattaccaacctgctgtaccacgtggtgggctggaccgactggaacctggccctgaaccccgaaggcggccccaactgggtgcggaacttcgtggactctcctatcatcgtggatattaccaaggataccttttacaagcagcctatgttctaccacctgggccacttcagcaagttcatccctgagggctctcagcgggtgggcctggtggcctctcagaaaaacgacctggatgccgttgccctgatgcaccccgacggcagcgccgtggtggtcgtcctgaatagaagctccaaggacgtgcctctgaccatcaaggaccccgctgtgggatttctggaaaccatcagccctggctacagcatccacacctacctgtggcggcggcagtagtaactcgaggacggggtgaactacgcctgaggatccgatctttttccctctgccaaaaattatggggacatcatgaagccccttgagcatctgacttctggctaataaaggaaatttattttcattgcaatagtgtgttggaattttttgtgtctctcactcggcctaggtagataagtagcatggcgggttaatcattaactacaaggaacccctagtgatggagttggccactccctctctgcgcgctcgctcgctcactgaggccgggcgaccaaaggtcgcccgacgcccgggctttgcccgggcggcctcagtgagcgagcgagcgcgcag

SEQ ID NO: 1825 - DNA, 3428 bp, Artificial Sequence
  source: /note="Description of Artificial Sequence: Synthetic polynucleotide"
ctgcgcgctcgctcgctcactgaggccgcccgggcaaagcccgggcgtcgggcgacctttggtcgcccggcctcagtgagcgagcgagcgcgcagagagggagtggccaactccatcactaggggttccttgtagttaatgattaacccgccatgctacttatctaccagggtaatggggatcctctagaactatagctagtcgacattgattattgactagttattaatagtaatcaattacggggtcattagttcatagcccatatatggagttccgcgttacataacttacggtaaatggcccgcctggctgaccgcccaacgacccccgcccattgacgtcaataatgacgtatgttcccatagtaacgccaatagggactttccattgacgtcaatgggtggagtatttacggtaaactgcccacttggcagtacatcaagtgtatcatatgccaagtacgccccctattgacgtcaatgacggtaaatggcccgcctggcattatgcccagtacatgaccttatgggactttcctacttggcagtacatctacgtattagtcatcgctattaccatgtcgaggccacgttctgcttcactctccccatctcccccccctccccacccccaattttgtatttatttattttttaattattttgtgcagcgatgggggcggggggggggggcgcgcgccaggcggggcggggcggggcgaggggcggggcggggcgaggcggagaggtgcggcggcagccaatcagagcggcgcgctccgaaagtttccttttatggcgaggcggcggcggcggcggccctataaaaagcgaagcgcgcggcgggcgggagcaagcttcgtttagtgaaccgtcagatcgcctggagacgccatccacgctgttttgacctccatagaagacaccgggaccgatccagcctccgcggattcgaatcccggccgggaacggtgcattggaacgcggattccccgtgccaagagtgacgtaagtaccgcctatagagtctataggcccacaaaaaatgctttcttcttttaatatacttttttgtttatcttatttctaatactttccctaatctctttctttcagggcaataatgatacaatgtatcatgcctctttgcaccattctaaagaataacagtgataatttctgggttaaggcaatagcaatatttctgcatataaatatttctgcatataaattgtaactgatgtaagaggtttcatattgctaatagcagctacaatccagctaccattctgcttttattttatggttgggataaggctggattattctgagtccaagctaggcccttttgctaatcatgttcatacctcttatcttcctcccacagctcctgggcaacgtgctggtctgtgtgctggcccatcactttggcaaagaattgggattcgaaccggtgccgccaccatggaattctctagcccatctagagaggaatgtcctaagcctctgtcaagagtgtccatcatggccggcagcctgacaggcctgctgctgctgcaggccgtgtcctgggccagtggagcccggccctgcatccctaagtccttcggctattctagcgtggtctgcgtgtgtaatgccacttactgcgacagcttcgaccctcctaccttccccgcccttggaacattcagcagatacgagagcaccagaagcggcagaagaatggaactgagcatgggcccaatccaggccaaccacaccggcaccggcctgctgctgacactgcaacctgagcagaagttccagaaggtgaagggatttggaggcgccatgaccgacgctgctgctctgaacatcctggccctctccccacctgctcagaacctgctgcttaaaagctacttcagcgaggaaggcatcggctataacatcatcagagtgcccatggccagctgcgacttcagcatcagaacatacacctacgccgatacacctgatgacttccaactgcacaacttcagcctgcctgaagaggacacaaagctgaaaatccccctgatccaccgggccctgcagctggcccagagacctgtgagcctgctggcctctccttggacaagccccacctggctgaagaccaatggagctgtgaacggcaagggcagcctgaagggccagcccggcgacatctaccaccaaacctgggctcgctacttcgtgaaattcctggacgcctacgctgagcataagctgcaattttgggccgttacagccgagaacgagccttctgccggcctgctgtctggatatcctttccagtgcctgggcttcacccctgagcaccagagagactttatcgccagagatctggggcctaccctggctaacagcacacaccacaacgtgcggctgctgatgctggacgatcagaggctgctgctcccccactgggccaaggtggtgctgacagatccggaggccgccaaatacgtgcacggcatcgccgtccactggtacctggatttcctggcccctgccaaggccaccctgggcgagacacatagactgtttcctaataccatgctgttcgccagcgaggcctgcgtgggcagcaagttctgggaacagagcgtgcggctgggcagctgggacagaggaatgcagtacagccacagcatcattaccaacctgctgtaccacgtggtgggctggaccgactggaacctggccctgaaccccgaaggcggccccaactgggtgcggaacttcgtggactctcctatcatcgtggatattaccaaggataccttttacaagcagcctatgttctaccacctgggccacttcagcaagttcatccctgagggctctcagcgggtgggcctggtggcctctcagaaaaacgacctggatgccgttgccctgatgcaccccgacggcagcgccgtggtggtcgtcctgaatagaagctccaaggacgtgcctctgaccatcaaggaccccgctgtgggatttctggaaaccatcagccctggctacagcatccacacctacctgtggcggcggcagcagagattcttcgagtagtaactcgaggacggggtgaactacgcctgaggatccgatctttttccctctgccaaaaattatggggacatcatgaagccccttgagcatctgacttctggctaataaaggaaatttattttcattgcaatagtgtgttggaattttttgtgtctctcactcggcctaggtagataagtagcatggcgggttaatcattaactacaaggaacccctagtgatggagttggccactccctctctgcgcgctcgctcgctcactgaggccgggcgaccaaaggtcgcccgacgcccgggctttgcccgggcggcctcagtgagcgagcgagcgcgcag

SEQ ID NO: 1826 - DNA, 3500 bp, Artificial Sequence
  source: /note="Description of Artificial Sequence: Synthetic polynucleotide"
ctgcgcgctcgctcgctcactgaggccgcccgggcaaagcccgggcgtcgggcgacctttggtcgcccggcctcagtgagcgagcgagcgcgcagagagggagtggccaactccatcactaggggttccttgtagttaatgattaacccgccatgctacttatctaccagggtaatggggatcctctagaactatagctagtcgacattgattattgactagttattaatagtaatcaattacggggtcattagttcatagcccatatatggagttccgcgttacataacttacggtaaatggcccgcctggctgaccgcccaacgacccccgcccattgacgtcaataatgacgtatgttcccatagtaacgccaatagggactttccattgacgtcaatgggtggagtatttacggtaaactgcccacttggcagtacatcaagtgtatcatatgccaagtacgccccctattgacgtcaatgacggtaaatggcccgcctggcattatgcccagtacatgaccttatgggactttcctacttggcagtacatctacgtattagtcatcgctattaccatgtcgaggccacgttctgcttcactctccccatctcccccccctccccacccccaattttgtatttatttattttttaattattttgtgcagcgatgggggcggggggggggggcgcgcgccaggcggggcggggcggggcgaggggcggggcggggcgaggcggagaggtgcggcggcagccaatcagagcggcgcgctccgaaagtttccttttatggcgaggcggcggcggcggcggccctataaaaagcgaagcgcgcggcgggcgggagcaagcttcgtttagtgaaccgtcagatcgcctggagacgccatccacgctgttttgacctccatagaagacaccgggaccgatccagcctccgcggattcgaatcccggccgggaacggtgcattggaacgcggattccccgtgccaagagtgacgtaagtaccgcctatagagtctataggcccacaaaaaatgctttcttcttttaatatacttttttgtttatcttatttctaatactttccctaatctctttctttcagggcaataatgatacaatgtatcatgcctctttgcaccattctaaagaataacagtgataatttctgggttaaggcaatagcaatatttctgcatataaatatttctgcatataaattgtaactgatgtaagaggtttcatattgctaatagcagctacaatccagctaccattctgcttttattttatggttgggataaggctggattattctgagtccaagctaggcccttttgctaatcatgttcatacctcttatcttcctcccacagctcctgggcaacgtgctggtctgtgtgctggcccatcactttggcaaagaattgggattcgaaccggtgccgccaccatggagttttcaagtccttccagagaggaatgtcccaagcctttgagtagggtaagcatcatggctggcagcctcacaggattgcttctacttcaggcagtgtcgtgggcatcaggtgcccgcccctgcatccctaaaagcttcggctacagctcggtggtgtgtgtctgcaatgccacatactgtgactcctttgaccccccgacctttcctgcccttggtaccttcagccgctatgagagtacacgcagtgggcgacggatggagctgagtatggggcccatccaggctaatcacacgggcacaggcctgctactgaccctgcagccagaacagaagttccagaaagtgaagggatttggaggggccatgacagatgctgctgctctcaacatccttgccctgtcaccccctgcccaaaatttgctacttaaatcgtacttctctgaagaaggaatcggatataacatcatccgggtacccatggccagctgtgacttctccatccgcacctacacctatgcagacacccctgatgatttccagttgcacaacttcagcctcccagaggaagataccaagctcaagatacccctgattcaccgagccctgcagttggcccagcgtcccgtttcactccttgccagcccctggacatcacccacttggctcaagaccaatggagcggtgaatgggaaggggtcactcaagggacagcccggagacatctaccaccagacctgggccagatactttgtgaagttcctggatgcctatgctgagcacaagttacagttctgggcagtgacagctgaaaatgagccttctgctgggctgttgagtggataccccttccagtgcctgggcttcacccctgaacatcagcgagacttcattgcccgtgacctaggtcctaccctcgccaacagtactcaccacaatgtccgcctactcatgctggatgaccaacgcttgctgctgccccactgggcaaaggtggtactgacagacccagaagcagctaaatatgttcatggcattgctgtacattggtacctggactttctggctccagccaaagccaccctaggggagacacaccgcctgttccccaacaccatgctctttgcctcagaggcctgtgtgggctccaagttctgggagcagagtgtgcggctaggctcctgggatcgagggatgcagtacagccacagcatcatcacgaacctcctgtaccatgtggtcggctggaccgactggaaccttgccctgaaccccgaaggaggacccaattgggtgcgtaactttgtcgacagtcccatcattgtagacatcaccaaggacacgttttacaaacagcccatgttctaccaccttggccacttcagcaagttcattcctgagggctcccagagagtggggctggttgccagtcagaagaacgacctggacgcagtggcactgatgcatcccgatggctctgctgttgtggtcgtgctaaaccgctcctctaaggatgtgcctcttaccatcaaggatcctgctgtgggcttcctggagacaatctcacctggctactccattcacacctacctgtggcgtcgccagggaggggggggttcgggtggcggcggaagtgggggcggtggttcttatggcaggaaaaagcggaggcaaaggcgccgccccccccagtagtaactcgaggacggggtgaactacgcctgaggatccgatctttttccctctgccaaaaattatggggacatcatgaagccccttgagcatctgacttctggctaataaaggaaatttattttcattgcaatagtgtgttggaattttttgtgtctctcactcggcctaggtagataagtagcatggcgggttaatcattaactacaaggaacccctagtgatggagttggccactccctctctgcgcgctcgctcgctcactgaggccgggcgaccaaaggtcgcccgacgcccgggctttgcccgggcggcctcagtgagcgagcgagcgcgcag

SEQ ID NO: 1827 - DNA, 3500 bp, Artificial Sequence
  source: /note="Description of Artificial Sequence: Synthetic polynucleotide"
ctgcgcgctcgctcgctcactgaggccgcccgggcaaagcccgggcgtcgggcgacctttggtcgcccggcctcagtgagcgagcgagcgcgcagagagggagtggccaactccatcactaggggttccttgtagttaatgattaacccgccatgctacttatctaccagggtaatggggatcctctagaactatagctagtcgacattgattattgactagttattaatagtaatcaattacggggtcattagttcatagcccatatatggagttccgcgttacataacttacggtaaatggcccgcctggctgaccgcccaacgacccccgcccattgacgtcaataatgacgtatgttcccatagtaacgccaatagggactttccattgacgtcaatgggtggagtatttacggtaaactgcccacttggcagtacatcaagtgtatcatatgccaagtacgccccctattgacgtcaatgacggtaaatggcccgcctggcattatgcccagtacatgaccttatgggactttcctacttggcagtacatctacgtattagtcatcgctattaccatgtcgaggccacgttctgcttcactctccccatctcccccccctccccacccccaattttgtatttatttattttttaattattttgtgcagcgatgggggcggggggggggggcgcgcgccaggcggggcggggcggggcgaggggcggggcggggcgaggcggagaggtgcggcggcagccaatcagagcggcgcgctccgaaagtttccttttatggcgaggcggcggcggcggcggccctataaaaagcgaagcgcgcggcgggcgggagcaagcttcgtttagtgaaccgtcagatcgcctggagacgccatccacgctgttttgacctccatagaagacaccgggaccgatccagcctccgcggattcgaatcccggccgggaacggtgcattggaacgcggattccccgtgccaagagtgacgtaagtaccgcctatagagtctataggcccacaaaaaatgctttcttcttttaatatacttttttgtttatcttatttctaatactttccctaatctctttctttcagggcaataatgatacaatgtatcatgcctctttgcaccattctaaagaataacagtgataatttctgggttaaggcaatagcaatatttctgcatataaatatttctgcatataaattgtaactgatgtaagaggtttcatattgctaatagcagctacaatccagctaccattctgcttttattttatggttgggataaggctggattattctgagtccaagctaggcccttttgctaatcatgttcatacctcttatcttcctcccacagctcctgggcaacgtgctggtctgtgtgctggcccatcactttggcaaagaattgggattcgaaccggtgccgccaccatggaattctctagcccatctagagaggaatgtcctaagcctctgtcaagagtgtccatcatggccggcagcctgacaggcctgctgctgctgcaggccgtgtcctgggccagtggagcccggccctgcatccctaagtccttcggctattctagcgtggtctgcgtgtgtaatgccacttactgcgacagcttcgaccctcctaccttccccgcccttggaacattcagcagatacgagagcaccagaagcggcagaagaatggaactgagcatgggcccaatccaggccaaccacaccggcaccggcctgctgctgacactgcaacctgagcagaagttccagaaggtgaagggatttggaggcgccatgaccgacgctgctgctctgaacatcctggccctctccccacctgctcagaacctgctgcttaaaagctacttcagcgaggaaggcatcggctataacatcatcagagtgcccatggccagctgcgacttcagcatcagaacatacacctacgccgatacacctgatgacttccaactgcacaacttcagcctgcctgaagaggacacaaagctgaaaatccccctgatccaccgggccctgcagctggcccagagacctgtgagcctgctggcctctccttggacaagccccacctggctgaagaccaatggagctgtgaacggcaagggcagcctgaagggccagcccggcgacatctaccaccaaacctgggctcgctacttcgtgaaattcctggacgcctacgctgagcataagctgcaattttgggccgttacagccgagaacgagccttctgccggcctgctgtctggatatcctttccagtgcctgggcttcacccctgagcaccagagagactttatcgccagagatctggggcctaccctggctaacagcacacaccacaacgtgcggctgctgatgctggacgatcagaggctgctgctcccccactgggccaaggtggtgctgacagatccggaggccgccaaatacgtgcacggcatcgccgtccactggtacctggatttcctggcccctgccaaggccaccctgggcgagacacatagactgtttcctaataccatgctgttcgccagcgaggcctgcgtgggcagcaagttctgggaacagagcgtgcggctgggcagctgggacagaggaatgcagtacagccacagcatcattaccaacctgctgtaccacgtggtgggctggaccgactggaacctggccctgaaccccgaaggcggccccaactgggtgcggaacttcgtggactctcctatcatcgtggatattaccaaggataccttttacaagcagcctatgttctaccacctgggccacttcagcaagttcatccctgagggctctcagcgggtgggcctggtggcctctcagaaaaacgacctggatgccgttgccctgatgcaccccgacggcagcgccgtggtggtcgtcctgaatagaagctccaaggacgtgcctctgaccatcaaggaccccgctgtgggatttctggaaaccatcagccctggctacagcatccacacctacctgtggcggcggcagggaggggggggttcgggtggcggcggaagtgggggcggtggttcttatggcaggaaaaagcggaggcaaaggcgccgccccccccagtagtaactcgaggacggggtgaactacgcctgaggatccgatctttttccctctgccaaaaattatggggacatcatgaagccccttgagcatctgacttctggctaataaaggaaatttattttcattgcaatagtgtgttggaattttttgtgtctctcactcggcctaggtagataagtagcatggcgggttaatcattaactacaaggaacccctagtgatggagttggccactccctctctgcgcgctcgctcgctcactgaggccgggcgaccaaaggtcgcccgacgcccgggctttgcccgggcggcctcagtgagcgagcgagcgcgcag

SEQ ID NO: 1828 - DNA, 3571 bp, Artificial Sequence
  source: /note="Description of Artificial Sequence: Synthetic polynucleotide"
ctgcgcgctcgctcgctcactgaggccgcccgggcaaagcccgggcgtcgggcgacctttggtcgcccggcctcagtgagcgagcgagcgcgcagagagggagtggccaactccatcactaggggttccttgtagttaatgattaacccgccatgctacttatctaccagggtaatggggatcctctagaactatagctagtcgacattgattattgactagttattaatagtaatcaattacggggtcattagttcatagcccatatatggagttccgcgttacataacttacggtaaatggcccgcctggctgaccgcccaacgacccccgcccattgacgtcaataatgacgtatgttcccatagtaacgccaatagggactttccattgacgtcaatgggtggagtatttacggtaaactgcccacttggcagtacatcaagtgtatcatatgccaagtacgccccctattgacgtcaatgacggtaaatggcccgcctggcattatgcccagtacatgaccttatgggactttcctacttggcagtacatctacgtattagtcatcgctattaccatgtcgaggccacgttctgcttcactctccccatctcccccccctccccacccccaattttgtatttatttattttttaattattttgtgcagcgatgggggcggggggggggggcgcgcgccaggcggggcggggcggggcgaggggcggggcggggcgaggcggagaggtgcggcggcagccaatcagagcggcgcgctccgaaagtttccttttatggcgaggcggcggcggcggcggccctataaaaagcgaagcgcgcggcgggcgggagcaagcttcgtttagtgaaccgtcagatcgcctggagacgccatccacgctgttttgacctccatagaagacaccgggaccgatccagcctccgcggattcgaatcccggccgggaacggtgcattggaacgcggattccccgtgccaagagtgacgtaagtaccgcctatagagtctataggcccacaaaaaatgctttcttcttttaatatacttttttgtttatcttatttctaatactttccctaatctctttctttcagggcaataatgatacaatgtatcatgcctctttgcaccattctaaagaataacagtgataatttctgggttaaggcaatagcaatatttctgcatataaatatttctgcatataaattgtaactgatgtaagaggtttcatattgctaatagcagctacaatccagctaccattctgcttttattttatggttgggataaggctggattattctgagtccaagctaggcccttttgctaatcatgttcatacctcttatcttcctcccacagctcctgggcaacgtgctggtctgtgtgctggcccatcactttggcaaagaattgggattcgaaccggtgccgccaccatggaattctctagcccatctagagaggaatgtcctaagcctctgtcaagagtgtccatcatggccggcagcctgacaggcctgctgctgctgcaggccgtgtcctgggccagtggagcccggccctgcatccctaagtccttcggctattctagcgtggtctgcgtgtgtaatgccacttactgcgacagcttcgaccctcctaccttccccgcccttggaacattcagcagatacgagagcaccagaagcggcagaagaatggaactgagcatgggcccaatccaggccaaccacaccggcaccggcctgctgctgacactgcaacctgagcagaagttccagaaggtgaagggatttggaggcgccatgaccgacgctgctgctctgaacatcctggccctctccccacctgctcagaacctgctgcttaaaagctacttcagcgaggaaggcatcggctataacatcatcagagtgcccatggccagctgcgacttcagcatcagaacatacacctacgccgatacacctgatgacttccaactgcacaacttcagcctgcctgaagaggacacaaagctgaaaatccccctgatccaccgggccctgcagctggcccagagacctgtgagcctgctggcctctccttggacaagccccacctggctgaagaccaatggagctgtgaacggcaagggcagcctgaagggccagcccggcgacatctaccaccaaacctgggctcgctacttcgtgaaattcctggacgcctacgctgagcataagctgcaattttgggccgttacagccgagaacgagccttctgccggcctgctgtctggatatcctttccagtgcctgggcttcacccctgagcaccagagagactttatcgccagagatctggggcctaccctggctaacagcacacaccacaacgtgcggctgctgatgctggacgatcagaggctgctgctcccccactgggccaaggtggtgctgacagatccggaggccgccaaatacgtgcacggcatcgccgtccactggtacctggatttcctggcccctgccaaggccaccctgggcgagacacatagactgtttcctaataccatgctgttcgccagcgaggcctgcgtgggcagcaagttctgggaacagagcgtgcggctgggcagctgggacagaggaatgcagtacagccacagcatcattaccaacctgctgtaccacgtggtgggctggaccgactggaacctggccctgaaccccgaaggcggccccaactgggtgcggaacttcgtggactctcctatcatcgtggatattaccaaggataccttttacaagcagcctatgttctaccacctgggccacttcagcaagttcatccctgagggctctcagcgggtgggcctggtggcctctcagaaaaacgacctggatgccgttgccctgatgcaccccgacggcagcgccgtggtggtcgtcctgaatagaagctccaaggacgtgcctctgaccatcaaggaccccgctgtgggatttctggaaaccatcagccctggctacagcatccacacctacctgtggcggcggcagtagtaacctcgaggtaccaggagctcttctcctagtgaattctaccagtgccatagatagttaagtgaattctaccagtgccatagatagttaagtgaattctaccagtgccatagatagttaagtgaattctaccagtgccatactgcagtcaggtctataccatcgaggacggggtgaactacgcctgaggatccgatctttttccctctgccaaaaattatggggacatcatgaagccccttgagcatctgacttctggctaataaaggaaatttattttcattgcaatagtgtgttggaattttttgtgtctctcactcggcctaggtagataagtagcatggcgggttaatcattaactacaaggaacccctagtgatggagttggccactccctctctgcgcgctcgctcgctcactgaggccgggcgaccaaaggtcgcccgacgcccgggctttgcccgggcggcctcagtgagcgagcgagcgcgcag

SEQ ID NO: 1829 - DNA, 130 bp, Artificial Sequence
  source: /note="Description of Artificial Sequence: Synthetic polynucleotide"
ctgcgcgctcgctcgctcactgaggccgcccgggcaaagcccgggcgtcgggcgacctttggtcgcccggcctcagtgagcgagcgagcgcgcagagagggagtggccaactccatcactaggggttcct

SEQ ID NO: 1830 - DNA, 130 bp, Artificial Sequence
  source: /note="Description of Artificial Sequence: Synthetic polynucleotide"
aggaacccctagtgatggagttggccactccctctctgcgcgctcgctcgctcactgaggccgggcgaccaaaggtcgcccgacgcccgggctttgcccgggcggcctcagtgagcgagcgagcgcgcag

SEQ ID NO: 1831 - DNA, 380 bp, Human betafrpesvirus 5
gacattgattattgactagttattaatagtaatcaattacggggtcattagttcatagcccatatatggagttccgcgttacataacttacggtaaatggcccgcctggctgaccgcccaacgacccccgcccattgacgtcaataatgacgtatgttcccatagtaacgccaatagggactttccattgacgtcaatgggtggagtatttacggtaaactgcccacttggcagtacatcaagtgtatcatatgccaagtacgccccctattgacgtcaatgacggtaaatggcccgcctggcattatgcccagtacatgaccttatgggactttcctacttggcagtacatctacgtattagtcatcgctattaccatg

SEQ ID NO: 1832 - DNA, 205 bp, Human betafrpesvirus 5
gtgatgcggttttggcagtacatcaatgggcgtggatagcggtttgactcacggggatttccaagtctccaccccattgacgtcaatgggagtttgttttggcaccaaaatcaacgggactttccaaaatgtcgtaacaactccgccccattgacgcaaatgggcggtaggcgtgtacggtgggaggtctatataagcagagctc

SEQ ID NO: 1833 - DNA, 585 bp, Human betafrpesvirus 5
gacattgattattgactagttattaatagtaatcaattacggggtcattagttcatagcccatatatggagttccgcgttacataacttacggtaaatggcccgcctggctgaccgcccaacgacccccgcccattgacgtcaataatgacgtatgttcccatagtaacgccaatagggactttccattgacgtcaatgggtggagtatttacggtaaactgcccacttggcagtacatcaagtgtatcatatgccaagtacgccccctattgacgtcaatgacggtaaatggcccgcctggcattatgcccagtacatgaccttatgggactttcctacttggcagtacatctacgtattagtcatcgctattaccatggtgatgcggttttggcagtacatcaatgggcgtggatagcggtttgactcacggggatttccaagtctccaccccattgacgtcaatgggagtttgttttggcaccaaaatcaacgggactttccaaaatgtcgtaacaactccgccccattgacgcaaatgggcggtaggcgtgtacggtgggaggtctatataagcagagctc

SEQ ID NO: 1834 - DNA, 260 bp, Artificial Sequence
  source: /note="Description of Artificial Sequence: Synthetic polynucleotide"
ccacgttctgcttcactctccccatctcccccccctccccacccccaattttgtatttatttattttttaattattttgtgcagcgatgggggcggggggggggggcgcgcgccaggcggggcggggcggggcgaggggcggggcggggcgaggcggagaggtgcggcggcagccaatcagagcggcgcgctccgaaagtttccttttatggcgaggcggcggcggcggcggccctataaaaagcgaagcgcgcggcggg

SEQ ID NO: 1835 - DNA, 1715 bp, Artificial Sequence
  source: /note="Description of Artificial Sequence: Synthetic polynucleotide"
ctagttattaatagtaatcaattacggggtcattagttcatagcccatatatggagttccgcgttacataacttacggtaaatggcccgcctggctgaccgcccaacgacccccgcccattgacgtcaataatgacgtatgttcccatagtaacgccaatagggactttccattgacgtcaatgggtggagtatttacggtaaactgcccacttggcagtacatcaagtgtatcatatgccaagtacgccccctattgacgtcaatgacggtaaatggcccgcctggcattatgcccagtacatgaccttatgggactttcctacttggcagtacatctacgtattagtcatcgctattaccatggtcgaggtgagccccacgttctgcttcactctccccatctcccccccctccccacccccaattttgtatttatttattttttaattattttgtgcagcgatgggggcggggggggggggggggcgcgcgccaggcggggcggggcggggcgaggggcggggcggggcgaggcggagaggtgcggcggcagccaatcagagcggcgcgctccgaaagtttccttttatggcgaggcggcggcggcggcggccctataaaaagcgaagcgcgcggcgggcgggagtcgctgcgcgctgccttcgccccgtgccccgctccgccgccgcctcgcgccgcccgccccggctctgactgaccgcgttactcccacaggtgagcgggcgggacggcccttctcctccgggctgtaattagcgcttggtttaatgacggcttgtttcttttctgtggctgcgtgaaagccttgaggggctccgggagggccctttgtgcggggggagcggctcggggggtgcgtgcgtgtgtgtgtgcgtggggagcgccgcgtgcggctccgcgctgcccggcggctgtgagcgctgcgggcgcggcgcggggctttgtgcgctccgcagtgtgcgcgaggggagcgcggccgggggcggtgccccgcggtgcggggggggctgcgaggggaacaaaggctgcgtgcggggtgtgtgcgtgggggggtgagcagggggtgtgggcgcgtcggtcgggctgcaaccccccctgcacccccctccccgagttgctgagcacggcccggcttcgggtgcggggctccgtacggggcgtggcgcggggctcgccgtgccgggcggggggtggcggcaggtgggggtgccgggcggggcggggccgcctcgggccggggagggctcgggggaggggcgcggcggcccccggagcgccggcggctgtcgaggcgcggcgagccgcagccattgccttttatggtaatcgtgcgagagggcgcagggacttcctttgtcccaaatctgtgcggagccgaaatctgggaggcgccgccgcaccccctctagcgggcgcggggcgaagcggtgcggcgccggcaggaaggaaatgggcggggagggccttcgtgcgtcgccgcgccgccgtccccttctccctctccagcctcggggctgtccgcggggggacggctgccttcgggggggacggggcagggcggggttcggcttctggcgtgtgaccggcggctctagagcctctgctaaccatgttcatgccttcttctttttcctacagctcctgggcaacgtgctggttattgtgctgtctcatcattttggcaaagaattc

SEQ ID NO: 1836 - DNA, 283 bp, Artificial Sequence
  source: /note="Description of Artificial Sequence: Synthetic polynucleotide"
catggtcgaggtgagccccacgttctgcttcactctccccatctcccccccctccccacccccaattttgtatttatttattttttaattattttgtgcagcgatgggggcggggggggggggggggcgcgcgccaggcggggcggggcggggcgaggggcggggcggggcgaggcggagaggtgcggcggcagccaatcagagcggcgcgctccgaaagtttccttttatggcgaggcggcggcggcggcggccctataaaaagcgaagcgcgcggcgggcg

SEQ ID NO: 1837 - DNA, 1016 bp, Artificial Sequence
  source: /note="Description of Artificial Sequence: Synthetic polynucleotide"
ggagtcgctgcgcgctgccttcgccccgtgccccgctccgccgccgcctcgcgccgcccgccccggctctgactgaccgcgttactcccacaggtgagcgggcgggacggcccttctcctccgggctgtaattagcgcttggtttaatgacggcttgtttcttttctgtggctgcgtgaaagccttgaggggctccgggagggccctttgtgcggggggagcggctcggggggtgcgtgcgtgtgtgtgtgcgtggggagcgccgcgtgcggctccgcgctgcccggcggctgtgagcgctgcgggcgcggcgcggggctttgtgcgctccgcagtgtgcgcgaggggagcgcggccgggggcggtgccccgcggtgcggggggggctgcgaggggaacaaaggctgcgtgcggggtgtgtgcgtgggggggtgagcagggggtgtgggcgcgtcggtcgggctgcaaccccccctgcacccccctccccgagttgctgagcacggcccggcttcgggtgcggggctccgtacggggcgtggcgcggggctcgccgtgccgggcggggggtggcggcaggtgggggtgccgggcggggcggggccgcctcgggccggggagggctcgggggaggggcgcggcggcccccggagcgccggcggctgtcgaggcgcggcgagccgcagccattgccttttatggtaatcgtgcgagagggcgcagggacttcctttgtcccaaatctgtgcggagccgaaatctgggaggcgccgccgcaccccctctagcgggcgcggggcgaagcggtgcggcgccggcaggaaggaaatgggcggggagggccttcgtgcgtcgccgcgccgccgtccccttctccctctccagcctcggggctgtccgcggggggacggctgccttcgggggggacggggcagggcggggttcggcttctggcgtgtgaccggcggctctagagcctctgctaaccatgttcatgccttcttctttttcctaca

SEQ ID NO: 1838 - DNA, 10 bp, Artificial Sequence
  source: /note="Description of Artificial Sequence: Synthetic oligonucleotide"
gcatgcgtga

SEQ ID NO: 1839 - DNA, 1189 bp, Artificial Sequence
  source: /note="Description of Artificial Sequence: Synthetic polynucleotide"
gcatgcgtgaggctccggtgcccgtcagtgggcagagcgcacatcgcccacagtccccgagaagttggggggaggggtcggcaattgaaccggtgcctagagaaggtggcgcggggtaaactgggaaagtgatgtcgtgtactggctccgcctttttcccgagggtgggggagaaccgtatataagtgcagtagtcgccgtgaacgttctttttcgcaacgggtttgccgccagaacacaggtaagtgccgtgtgtggttcccgcgggcctggcctctttacgggttatggcccttgcgtgccttgaattacttccacctggctgcagtacgtgattcttgatcccgagcttcgggttggaagtgggtgggagagttcgaggccttgcgcttaaggagccccttcgcctcgtgcttgagttgaggcctggcctgggcgctggggccgccgcgtgcgaatctggtggcaccttcgcgcctgtctcgctgctttcgataagtctctagccatttaaaatttttgatgacctgctgcgacgctttttttctggcaagatagtcttgtaaatgcgggccaagatctgcacactggtatttcggtttttggggccgcgggcggcgacggggcccgtgcgtcccagcgcacatgttcggcgaggcggggcctgcgagcgcggccaccgagaatcggacgggggtagtctcaagctggccggcctgctctggtgcctggcctcgcgccgccgtgtatcgccccgccctgggcggcaaggctggcccggtcggcaccagttgcgtgagcggaaagatggccgcttcccggccctgctgcagggagctcaaaatggaggacgcggcgctcgggagagcgggcgggtgagtcacccacacaaaggaaaagggcctttccgtcctcagccgtcgcttcatgtgactccacggagtaccgggcgccgtccaggcacctcgattagttctcgagcttttggagtacgtcgtctttaggttggggggaggggttttatgcgatggagtttccccacactgagtgggtggagactgaagttaggccagcttggcacttgatgtaattctccttggaatttgccctttttgagtttggatcttggttcattctcaagcctcagacagtggttcaaagtttttttcttccatttcaggtgtcgtga

SEQ ID NO: 1840 - DNA, 1179 bp, Artificial Sequence
  source: /note="Description of Artificial Sequence: Synthetic polynucleotide"
ggctccggtgcccgtcagtgggcagagcgcacatcgcccacagtccccgagaagttggggggaggggtcggcaattgaaccggtgcctagagaaggtggcgcggggtaaactgggaaagtgatgtcgtgtactggctccgcctttttcccgagggtgggggagaaccgtatataagtgcagtagtcgccgtgaacgttctttttcgcaacgggtttgccgccagaacacaggtaagtgccgtgtgtggttcccgcgggcctggcctctttacgggttatggcccttgcgtgccttgaattacttccacctggctgcagtacgtgattcttgatcccgagcttcgggttggaagtgggtgggagagttcgaggccttgcgcttaaggagccccttcgcctcgtgcttgagttgaggcctggcctgggcgctggggccgccgcgtgcgaatctggtggcaccttcgcgcctgtctcgctgctttcgataagtctctagccatttaaaatttttgatgacctgctgcgacgctttttttctggcaagatagtcttgtaaatgcgggccaagatctgcacactggtatttcggtttttggggccgcgggcggcgacggggcccgtgcgtcccagcgcacatgttcggcgaggcggggcctgcgagcgcggccaccgagaatcggacgggggtagtctcaagctggccggcctgctctggtgcctggcctcgcgccgccgtgtatcgccccgccctgggcggcaaggctggcccggtcggcaccagttgcgtgagcggaaagatggccgcttcccggccctgctgcagggagctcaaaatggaggacgcggcgctcgggagagcgggcgggtgagtcacccacacaaaggaaaagggcctttccgtcctcagccgtcgcttcatgtgactccacggagtaccgggcgccgtccaggcacctcgattagttctcgagcttttggagtacgtcgtctttaggttggggggaggggttttatgcgatggagtttccccacactgagtgggtggagactgaagttaggccagcttggcacttgatgtaattctccttggaatttgccctttttgagtttggatcttggttcattctcaagcctcagacagtggttcaaagtttttttcttccatttcaggtgtcgtga

SEQ ID NO: 1841 - DNA, 939 bp, Artificial Sequence
  source: /note="Description of Artificial Sequence: Synthetic polynucleotide"
gtaagtgccgtgtgtggttcccgcgggcctggcctctttacgggttatggcccttgcgtgccttgaattacttccacctggctgcagtacgtgattcttgatcccgagcttcgggttggaagtgggtgggagagttcgaggccttgcgcttaaggagccccttcgcctcgtgcttgagttgaggcctggcctgggcgctggggccgccgcgtgcgaatctggtggcaccttcgcgcctgtctcgctgctttcgataagtctctagccatttaaaatttttgatgacctgctgcgacgctttttttctggcaagatagtcttgtaaatgcgggccaagatctgcacactggtatttcggtttttggggccgcgggcggcgacggggcccgtgcgtcccagcgcacatgttcggcgaggcggggcctgcgagcgcggccaccgagaatcggacgggggtagtctcaagctggccggcctgctctggtgcctggcctcgcgccgccgtgtatcgccccgccctgggcggcaaggctggcccggtcggcaccagttgcgtgagcggaaagatggccgcttcccggccctgctgcagggagctcaaaatggaggacgcggcgctcgggagagcgggcgggtgagtcacccacacaaaggaaaagggcctttccgtcctcagccgtcgcttcatgtgactccacggagtaccgggcgccgtccaggcacctcgattagttctcgagcttttggagtacgtcgtctttaggttggggggaggggttttatgcgatggagtttccccacactgagtgggtggagactgaagttaggccagcttggcacttgatgtaattctccttggaatttgccctttttgagtttggatcttggttcattctcaagcctcagacagtggttcaaagtttttttcttccatttcag

SEQ ID NO: 1842 - DNA, 566 bp, Artificial Sequence
  source: /note="Description of Artificial Sequence: Synthetic polynucleotide"
tcagatcgcctggagacgccatccacgctgttttgacctccatagaagacaccgggaccgatccagcctccgcggattcgaatcccggccgggaacggtgcattggaacgcggattccccgtgccaagagtgacgtaagtaccgcctatagagtctataggcccacaaaaaatgctttcttcttttaatatacttttttgtttatcttatttctaatactttccctaatctctttctttcagggcaataatgatacaatgtatcatgcctctttgcaccattctaaagaataacagtgataatttctgggttaaggcaatagcaatatttctgcatataaatatttctgcatataaattgtaactgatgtaagaggtttcatattgctaatagcagctacaatccagctaccattctgcttttattttatggttgggataaggctggattattctgagtccaagctaggcccttttgctaatcatgttcatacctcttatcttcctcccacagctcctgggcaacgtgctggtctgtgtgctggcccatcactttggcaaagaatt

SEQ ID NO: 1843 - protein, 5 aa, Artificial Sequence
  source: /note="Description of Artificial Sequence: Synthetic peptide"
GGGGS

SEQ ID NO: 1844 - skipped

SEQ ID NO: 1845 - protein, 15 aa, Artificial Sequence
  source: /note="Description of Artificial Sequence: Synthetic peptide"
GGGGSGGGGSGGGGS

SEQ ID NO: 1846 - DNA, 127 bp, Artificial Sequence
  source: /note="Description of Artificial Sequence: Synthetic polynucleotide"
gatctttttccctctgccaaaaattatggggacatcatgaagccccttgagcatctgacttctggctaataaaggaaatttattttcattgcaatagtgtgttggaattttttgtgtctctcactcg

SEQ ID NO: 1847 - DNA, 22 bp, Unknown
  source: /note="Description of Unknown: miR183 binding site sequence"
agtgaattctaccagtgccata

SEQ ID NO: 1848 - DNA, 8 bp, Artificial Sequence
  source: /note="Description of Artificial Sequence: Synthetic oligonucleotide"
gatagtta

SEQ ID NO: 1849 - DNA, 112 bp, Unknown
  source: /note="Description of Unknown: miR183 binding site sequence"
agtgaattctaccagtgccatagatagttaagtgaattctaccagtgccatagatagttaagtgaattctaccagtgccatagatagttaagtgaattctaccagtgccata

SEQ ID NO: 1850 - DNA, 117 bp, Artificial Sequence
  source: /note="Description of Artificial Sequence: Synthetic polynucleotide"
atggaattctctagcccatctagagaggaatgtcctaagcctctgtcaagagtgtccatcatggccggcagcctgacaggcctgctgctgctgcaggccgtgtcctgggccagtgga

SEQ ID NO: 1851 - DNA, 117 bp, Artificial Sequence
  source: /note="Description of Artificial Sequence: Synthetic polynucleotide"
atggagttttcaagtccttccagagaggaatgtcccaagcctttgagtagggtaagcatcatggctggcagcctcacaggattgcttctacttcaggcagtgtcgtgggcatcaggt

SEQ ID NO: 1852 - DNA, 117 bp, Artificial Sequence
  source: /note="Description of Artificial Sequence: Synthetic polynucleotide"
atggaattcagcagccccagcagagaggaatgccccaagcctctgagccgggtgtcaatcatggccggatctctgacaggactgctgctgcttcaggccgtgtcttgggcttctggc

SEQ ID NO: 1853 - protein, 39 aa, Artificial Sequence
  source: /note="Description of Artificial Sequence: Synthetic polypeptide"
MEFSSPSREECPKPLSRVSIMAGSLTGLLLLQAVSWASG

SEQ ID NO: 1854 - protein, 4 aa, Artificial Sequence
  source: /note="Description of Artificial Sequence: Synthetic peptide"
RKRR

SEQ ID NO: 1855 - protein, 18 aa, Artificial Sequence
  source: /note="Description of Artificial Sequence: Synthetic peptide"
EGRGSLLTCGDVEENPGP

SEQ ID NO: 1856 - DNA, 48 bp, Homo sapiens
atgtacgccctcttcctcctggccagcctcctgggcgcggctctagcc

SEQ ID NO: 1857 - protein, 16 aa, Homo sapiens
MYALFLLASLLGAALA

SEQ ID NO: 1858 - DNA, 1575 bp, Homo sapiens
atgtacgccctcttcctcctggccagcctcctgggcgcggctctagccggcccggtccttggactgaaagaatgcaccaggggctcggcagtgtggtgccagaatgtgaagacggcgtccgactgcggggcagtgaagcactgcctgcagaccgtttggaacaagccaacagtgaaatcccttccctgcgacatatgcaaagacgttgtcaccgcagctggtgatatgctgaaggacaatgccactgaggaggagatccttgtttacttggagaagacctgtgactggcttccgaaaccgaacatgtctgcttcatgcaaggagatagtggactcctacctccctgtcatcctggacatcattaaaggagaaatgagccgtcctggggaggtgtgctctgctctcaacctctgcgagtctctccagaagcacctagcagagctgaatcaccagaagcagctggagtccaataagatcccagagctggacatgactgaggtggtggcccccttcatggccaacatccctctcctcctctaccctcaggacggcccccgcagcaagccccagccaaaggataatggggacgtttgccaggactgcattcagatggtgactgacatccagactgctgtacggaccaactccacctttgtccaggccttggtggaacatgtcaaggaggagtgtgaccgcctgggccctggcatggccgacatatgcaagaactatatcagccagtattctgaaattgctatccagatgatgatgcacatgcaacccaaggagatctgtgcgctggttgggttctgtgatgaggtgaaagagatgcccatgcagactctggtccccgccaaagtggcctccaagaatgtcatccctgccctggaactggtggagcccattaagaagcacgaggtcccagcaaagtctgatgtttactgtgaggtgtgtgaattcctggtgaaggaggtgaccaagctgattgacaacaacaagactgagaaagaaatactcgacgcttttgacaaaatgtgctcgaagctgccgaagtccctgtcggaagagtgccaggaggtggtggacacgtacggcagctccatcctgtccatcctgctggaggaggtcagccctgagctggtgtgcagcatgctgcacctctgctctggcacgcggctgcctgcactgaccgttcacgtgactcagccaaaggacggtggcttctgcgaagtgtgcaagaagctggtgggttatttggatcgcaacctggagaaaaacagcaccaagcaggagatcctggctgctcttgagaaaggctgcagcttcctgccagacccttaccagaagcagtgtgatcagtttgtggcagagtacgagcccgtgctgatcgagatcctggtggaggtgatggatccttccttcgtgtgcttgaaaattggagcctgcccctcggcccataagcccttgttgggaactgagaagtgtatatggggcccaagctactggtgccagaacacagagacagcagcccagtgcaatgctgtcgagcattgcaaacgccatgtgtggaactag

SEQ ID NO: 1859 - DNA, 1527 bp, Homo sapiens
ggcccggtccttggactgaaagaatgcaccaggggctcggcagtgtggtgccagaatgtgaagacggcgtccgactgcggggcagtgaagcactgcctgcagaccgtttggaacaagccaacagtgaaatcccttccctgcgacatatgcaaagacgttgtcaccgcagctggtgatatgctgaaggacaatgccactgaggaggagatccttgtttacttggagaagacctgtgactggcttccgaaaccgaacatgtctgcttcatgcaaggagatagtggactcctacctccctgtcatcctggacatcattaaaggagaaatgagccgtcctggggaggtgtgctctgctctcaacctctgcgagtctctccagaagcacctagcagagctgaatcaccagaagcagctggagtccaataagatcccagagctggacatgactgaggtggtggcccccttcatggccaacatccctctcctcctctaccctcaggacggcccccgcagcaagccccagccaaaggataatggggacgtttgccaggactgcattcagatggtgactgacatccagactgctgtacggaccaactccacctttgtccaggccttggtggaacatgtcaaggaggagtgtgaccgcctgggccctggcatggccgacatatgcaagaactatatcagccagtattctgaaattgctatccagatgatgatgcacatgcaacccaaggagatctgtgcgctggttgggttctgtgatgaggtgaaagagatgcccatgcagactctggtccccgccaaagtggcctccaagaatgtcatccctgccctggaactggtggagcccattaagaagcacgaggtcccagcaaagtctgatgtttactgtgaggtgtgtgaattcctggtgaaggaggtgaccaagctgattgacaacaacaagactgagaaagaaatactcgacgcttttgacaaaatgtgctcgaagctgccgaagtccctgtcggaagagtgccaggaggtggtggacacgtacggcagctccatcctgtccatcctgctggaggaggtcagccctgagctggtgtgcagcatgctgcacctctgctctggcacgcggctgcctgcactgaccgttcacgtgactcagccaaaggacggtggcttctgcgaagtgtgcaagaagctggtgggttatttggatcgcaacctggagaaaaacagcaccaagcaggagatcctggctgctcttgagaaaggctgcagcttcctgccagacccttaccagaagcagtgtgatcagtttgtggcagagtacgagcccgtgctgatcgagatcctggtggaggtgatggatccttccttcgtgtgcttgaaaattggagcctgcccctcggcccataagcccttgttgggaactgagaagtgtatatggggcccaagctactggtgccagaacacagagacagcagcccagtgcaatgctgtcgagcattgcaaacgccatgtgtggaactag

SEQ ID NO: 1860 - DNA, 19 bp, Artificial Sequence
  source: /note="Description of Artificial Sequence: Synthetic oligonucleotide"
tattagatctgatggccgc

SEQ ID NO: 1861 - DNA, 20 bp, Artificial Sequence
  source: /note="Description of Artificial Sequence: Synthetic oligonucleotide"
ctccatcactaggggttcct

SEQ ID NO: 1862 - DNA, 145 bp, Artificial Sequence
  source: /note="Description of Artificial Sequence: Synthetic polynucleotide"
aggaacccctagtgatggagttggccactccctctctgcgcgctcgctcgctcactgaggccgggcgaccaaaggtcgcccgacgcccgggctttgcccgggcggcctcagtgagcgagcgagcgcgcagagagggagtggccaa

SEQ ID NO: 1863 - DNA, 20 bp, Artificial Sequence
  source: /note="Description of Artificial Sequence: Synthetic oligonucleotide"
tattagatctgatggccgcg

SEQ ID NO: 1864 - DNA, 20 bp, Artificial Sequence
  source: /note="Description of Artificial Sequence: Synthetic oligonucleotide"
tccatcactaggggttcctg

SEQ ID NO: 1865 - DNA, 23 bp, Artificial Sequence
  source: /note="Description of Artificial Sequence: Synthetic oligonucleotide"
acaaacaccattgtcacactcca

SEQ ID NO: 1866 - DNA, 71 bp, Unknown
  source: /note="Description of Unknown: miR122 binding site sequence"
acaaacaccattgtcacactccacacaaacaccattgtcacactccacacaaacaccattgtcacactcca

SEQ ID NO: 1867 - DNA, 24 bp, Unknown
  source: /note="Description of Unknown: miR182 binding site sequence"
agtgtgagttctaccattgccaaa

SEQ ID NO: 1868 - DNA, 23 bp, Unknown
  source: /note="Description of Unknown: miR96 binding site sequence"
agcaaaaatgtgctagtgccaaa

SEQ ID NO: 1869 - DNA, 23 bp, Unknown
  source: /note="Description of Unknown: miR-142-3p binding site sequence"
tccataaagtaggaaacactaca

SEQ ID NO: 1870 - DNA, 3571 bp, Artificial Sequence
  source: /note="Description of Artificial Sequence: Synthetic polynucleotide"
ctgcgcgctcgctcgctcactgaggccgcccgggcaaagcccgggcgtcgggcgacctttggtcgcccggcctcagtgagcgagcgagcgcgcagagagggagtggccaactccatcactaggggttccttgtagttaatgattaacccgccatgctacttatctaccagggtaatggggatcctctagaactatagctagtcgacattgattattgactagttattaatagtaatcaattacggggtcattagttcatagcccatatatggagttccgcgttacataacttacggtaaatggcccgcctggctgaccgcccaacgacccccgcccattgacgtcaataatgacgtatgttcccatagtaacgccaatagggactttccattgacgtcaatgggtggagtatttacggtaaactgcccacttggcagtacatcaagtgtatcatatgccaagtacgccccctattgacgtcaatgacggtaaatggcccgcctggcattatgcccagtacatgaccttatgggactttcctacttggcagtacatctacgtattagtcatcgctattaccatgtcgaggccacgttctgcttcactctccccatctcccccccctccccacccccaattttgtatttatttattttttaattattttgtgcagcgatgggggcggggggggggggcgcgcgccaggcggggcggggcggggcgaggggcggggcggggcgaggcggagaggtgcggcggcagccaatcagagcggcgcgctccgaaagtttccttttatggcgaggcggcggcggcggcggccctataaaaagcgaagcgcgcggcgggcgggagcaagcttcgtttagtgaaccgtcagatcgcctggagacgccatccacgctgttttgacctccatagaagacaccgggaccgatccagcctccgcggattcgaatcccggccgggaacggtgcattggaacgcggattccccgtgccaagagtgacgtaagtaccgcctatagagtctataggcccacaaaaaatgctttcttcttttaatatacttttttgtttatcttatttctaatactttccctaatctctttctttcagggcaataatgatacaatgtatcatgcctctttgcaccattctaaagaataacagtgataatttctgggttaaggcaatagcaatatttctgcatataaatatttctgcatataaattgtaactgatgtaagaggtttcatattgctaatagcagctacaatccagctaccattctgcttttattttatggttgggataaggctggattattctgagtccaagctaggcccttttgctaatcatgttcatacctcttatcttcctcccacagctcctgggcaacgtgctggtctgtgtgctggcccatcactttggcaaagaattgggattcgaaccggtgccgccaccatggagttttcaagtccttccagagaggaatgtcccaagcctttgagtagggtaagcatcatggctggcagcctcacaggattgcttctacttcaggcagtgtcgtgggcatcaggtgcccgcccctgcatccctaaaagcttcggctacagctcggtggtgtgtgtctgcaatgccacatactgtgactcctttgaccccccgacctttcctgcccttggtaccttcagccgctatgagagtacacgcagtgggcgacggatggagctgagtatggggcccatccaggctaatcacacgggcacaggcctgctactgaccctgcagccagaacagaagttccagaaagtgaagggatttggaggggccatgacagatgctgctgctctcaacatccttgccctgtcaccccctgcccaaaatttgctacttaaatcgtacttctctgaagaaggaatcggatataacatcatccgggtacccatggccagctgtgacttctccatccgcacctacacctatgcagacacccctgatgatttccagttgcacaacttcagcctcccagaggaagataccaagctcaagatacccctgattcaccgagccctgcagttggcccagcgtcccgtttcactccttgccagcccctggacatcacccacttggctcaagaccaatggagcggtgaatgggaaggggtcactcaagggacagcccggagacatctaccaccagacctgggccagatactttgtgaagttcctggatgcctatgctgagcacaagttacagttctgggcagtgacagctgaaaatgagccttctgctgggctgttgagtggataccccttccagtgcctgggcttcacccctgaacatcagcgagacttcattgcccgtgacctaggtcctaccctcgccaacagtactcaccacaatgtccgcctactcatgctggatgaccaacgcttgctgctgccccactgggcaaaggtggtactgacagacccagaagcagctaaatatgttcatggcattgctgtacattggtacctggactttctggctccagccaaagccaccctaggggagacacaccgcctgttccccaacaccatgctctttgcctcagaggcctgtgtgggctccaagttctgggagcagagtgtgcggctaggctcctgggatcgagggatgcagtacagccacagcatcatcacgaacctcctgtaccatgtggtcggctggaccgactggaaccttgccctgaaccccgaaggaggacccaattgggtgcgtaactttgtcgacagtcccatcattgtagacatcaccaaggacacgttttacaaacagcccatgttctaccaccttggccacttcagcaagttcattcctgagggctcccagagagtggggctggttgccagtcagaagaacgacctggacgcagtggcactgatgcatcccgatggctctgctgttgtggtcgtgctaaaccgctcctctaaggatgtgcctcttaccatcaaggatcctgctgtgggcttcctggagacaatctcacctggctactccattcacacctacctgtggcgtcgccagtagtaacctcgaggtaccaggagctcttctcctagtgaattctaccagtgccatagatagttaagtgaattctaccagtgccatagatagttaagtgaattctaccagtgccatagatagttaagtgaattctaccagtgccatactgcagtcaggtctataccatcgaggacggggtgaactacgcctgaggatccgatctttttccctctgccaaaaattatggggacatcatgaagccccttgagcatctgacttctggctaataaaggaaatttattttcattgcaatagtgtgttggaattttttgtgtctctcactcggcctaggtagataagtagcatggcgggttaatcattaactacaaggaacccctagtgatggagttggccactccctctctgcgcgctcgctcgctcactgaggccgggcgaccaaaggtcgcccgacgcccgggctttgcccgggcggcctcagtgagcgagcgagcgcgcag

SEQ ID NO: 1871 - protein, 50 aa, Artificial Sequence
  source: /note="Description of Artificial Sequence: Synthetic polypeptide"
  SITE (1)..(50): /note="This sequence may encompass 1-10 'Gly Gly Gly Gly Ser' repeating units"
  source: /note="See specification as filed for detailed description of substitutions and preferred embodiments"
GGGGSGGGGSGGGGSGGGGSGGGGSGGGGSGGGGSGGGGSGGGGSGGGGS

SEQ ID NO: 1872 - protein, 40 aa, Artificial Sequence
  source: /note="Description of Artificial Sequence: Synthetic polypeptide"
  SITE (1)..(40): /note="This sequence may encompass 0-8 'Gly Gly Gly Gly Ser' repeating units"
  source: /note="See specification as filed for detailed description of substitutions and preferred embodiments"
GGGGSGGGGSGGGGSGGGGSGGGGSGGGGSGGGGSGGGGS

SEQ ID NO: 1873 - DNA, 45 bp, Artificial Sequence
  source: /note="Description of Artificial Sequence: Synthetic oligonucleotide"
ggtggtggtggtagcggcggcggcggctctggtggtggtggatcc
